(19) United States
(12) Patent Application Publication
(10) Pub. No.: US 2014/0038842 A1
(43) Pub. Date: Feb. 6, 2014

(54) CELL SURFACE DISPLAY USING PDZ DOMAINS

(71) Applicants: Eric M. Tam, Coquitlam, (CA); Isaac J. Rondon, San Francisco, CA (US); Chao B. Huang, San Leandro, CA (US); Violet Votin, Pleasant Hill, CA (US)

(72) Inventors: Eric M. Tam, Coquitlam, (CA); Isaac J. Rondon, San Francisco, CA (US); Chao B. Huang, San Leandro, CA (US); Violet Votin, Pleasant Hill, CA (US)

(73) Assignee: XOMA TECHNOLOGY, Berkeley, CA (US)

(21) Appl. No.: 13/995,611

(22) PCT Filed: Dec. 28, 2011
(86) PCT No.: PCT/US11/67482

§ 371 Date: Oct. 9, 2013

Related U.S. Application Data
(60) Provisional application No. 61/427,722, filed on Dec. 28, 2010.
(60) Provisional application No. 61/532,463, filed on Sep. 8, 2011.
(60) Provisional application No. 61/566,440, filed on Dec. 2, 2011.

(51) Int. Cl. C12N 15/10; C07K 16/00

(52) U.S. Cl. CPC C12N 15/1037; C07K 16/00
USPC 506/9; 435/254.2; 435/254.21; 435/254.23; 435/254.22; 435/252.3; 435/252.33; 435/252.31; 435/252.34; 435/328; 506/14; 506/26

(57) ABSTRACT

Novel materials and methods useful for displaying polypeptides on the surface of a cell are provided, including cell surface proteins fused to a PDZ domain peptide and antibodies fused to PDZ-binding peptides.

### CROSS REFERENCE TO RELATED APPLICATIONS

[0001] This application claims priority to U.S. Provisional Application No. 61/427,722, filed Dec. 28, 2010, U.S. Provisional Application No. 61/532,463, filed Sep. 8, 2011, and U.S. Provisional Application No. 61/566,440, filed Dec. 2, 2011.

### INCORPORATION BY REFERENCE OF MATERIAL SUBMITTED ELECTRONICALLY

[0002] Incorporated by reference in its entirety is a computer-readable nucleotide/amino acid sequence listing submitted concurrently herewith and identified as follows: One 935,414 byte ASCII (Text) file named “45636A_SeqListing.txt” created on Dec. 28, 2011.

### FIELD OF THE INVENTION

[0003] The invention relates to materials and methods useful for displaying proteins, including antibodies, on the surface of a cell.

### BACKGROUND

[0004] Display of peptides on the surface of filamentous bacteriophage, or phage display, has proven a versatile and effective methodology for the isolation of peptide ligands binding to a diverse range of targets. Phage display involves the localization of polypeptides as terminal fusions to the coat proteins, e.g., pIII, pVIII of bacteriophage particles. See Scott, J. K. and G. P. Smith (1990) Science 249(4967):386-390; and Lowman, H. B., et al. (1991) Biochem. 30(45):10832-10838. Generally, polypeptides that bind to the target of interest are isolated by incubating with a target, washing away non-binding phage, eluting the bound phage, and then re-amplifying the phage population by infecting a fresh culture of bacteria. Phage display is limited to about a few thousand copies of the displayed polypeptide per phage or less, far less (one to five copies) when pIII is the coat protein utilized for display, thereby precluding the use of sensitive fluorescence-activated cell sorting (FACS) methodologies for isolating the desired sequences. Moreover, phage can be difficult to elute or recover from an immobilized target ligand, thereby resulting in clonal loss.

[0005] It has been reported that polypeptides can be linked to yeast cell wall proteins and displayed on yeast cells (reviewed in Feldhaus and Siegel, J. Immunol. Methods, 290, 69-80 (2004); Wang et al., J. Immunol. Methods, 354, 11-19 (2010)).

[0006] PDZ domains are modular protein interaction domains that play a role in protein targeting and protein complex assembly. The structural features of PDZ domains allow them to mediate specific protein-protein interactions that underlie the assembly of large protein complexes involved in signaling or subcellular transport. Structurally, PDZ domains are composed of a 5- to 6-stranded anti-parallel β-barrel and 2-3 α-helices. PDZ domains typically recognize short sequences located at the C-termini of target proteins, although some PDZ domains are known to recognize internal sequences.

### SUMMARY OF THE INVENTION

[0007] This disclosure relates to methods and materials useful for displaying proteins-of-interest, including antibodies. Eukaryotic (including yeast and mammalian cells) and prokaryotic host cells are provided that display proteins on the surface of the cell via interaction of protein-PDZ-binding peptide fusions to PDZ Domain-cell surface protein fusions.

[0008] One aspect of the disclosure provides a polynucleotide (e.g., DNA, cDNA, RNA) encoding a cell surface protein fused to a PDZ Domain and/or a polynucleotide encoding a protein of interest (such as a polypeptide binding agent, an antibody, or antigen-binding fragment thereof), fused to a PDZ-binding peptide. In some embodiments, the polynucleotides are in the same vector; in other embodiments they are in different vectors; and in yet other embodiments one polynucleotide, e.g., the polynucleotide encoding a cell surface protein fused to a PDZ Domain, is integrated into the host cell genome.

[0009] Related aspects of the disclosure provide these polynucleotides operably linked to sequences that regulate expression of the encoded fusion protein(s), and vectors or chromosomes comprising these polynucleotides. Another related aspect of the disclosure provides host cells comprising such polynucleotides and/or vectors, and methods of using such host cells to display the protein of interest on the host cell surface. Yet another related aspect of the disclosure provides the fusion proteins encoded by the polynucleotides, either displayed on the surface of a host cell, or in an isolated or purified form. In particular, isolated or purified antibodies retaining the PDZ-binding peptide portion are contemplated.

[0010] In some or any of the embodiments described herein, the PDZ-binding peptide is 5 to 20 or 5 to 15 amino acids in length, for example 5, 6, 7, 8, 9, 10, 11, 12, 13, 14, 15, 16, 17, 18, 19, or 20 amino acids in length or any range between any of these lengths. In example embodiments, the PDZ-binding peptide is 15 or fewer amino acids in length, or 14, 13, 12, 11, 10, 9, 8, 7, 6, or 5 or fewer amino acids in length.

[0011] In some or any of the embodiments herein, the PDZ-binding peptide comprises a C-terminal sequence of NorpA (SEQ ID NO: 1) or is a peptide at least 80%, 85% or 90% identical to a fragment thereof at least 7 amino acids in length.

[0012] In an exemplary embodiment, the PDZ-binding peptide sequence is GKTEFCA (the last 7 amino acid residues of SEQ ID NO: 1).

[0013] In some or any of the embodiments herein, the PDZ-binding peptide is fused to the C-terminus of the protein of interest, e.g., antibody or antigen-binding fragment thereof.

[0014] In some or any of the embodiments herein, the PDZ Domain is about 80 to 120 amino acids in length, for example 80, 81, 81, 83, 84, 85, 86, 87, 88, 89, 90, 91, 92, 93, 94, 95, 96, 97, 98, 99, 100, 101, 102, 103, 104, 105, 106, 107, 108, 109, 110, 111, 112, 113, 114, 115, 116, 117, 118, 119, or 120 amino acids in length, or any range between any of these lengths.

[0015] In example embodiments of the disclosure, the PDZ Domain is selected from the group consisting of an InaD PDZ domain (SEQ ID NO: 2), a Dishevelled 1-like (DVL1L) PDZ domain (SEQ ID NO: 3), a proTGF-alpha cytoplasmic domain-interacting proteins 18 (TACIP18) PDZ1 domain (SEQ ID NO: 4), a similar to TACIP18 (SITAC) PDZ1 domain (SEQ ID NO: 5), a PSD-95/SAP90 PDZ3 domain (SEQ ID NO: 6), an Erbin PDZ domain (SEQ ID NO: 7), a PDZ-like domain, a PDZ dimer, a tandem PDZ domain, or a fragment, an extension, or variant thereof. In example embodiments, the fragments are at least about 20, 25, 30, 35, 40, 45, 50, 55, 60, 65, 70, 75, or 80 amino acids in length. In example embodiments, the extension is at least about 5, 6, 7, 8, 9, 10, 11, 12, 13, 14, 15, about 20, about 25, or about 30 amino acids in length. In example embodiments, the extension comprises residues 394-399 of SEQ ID NO: 6. In example embodiments, the variants comprise an amino acid sequence at least 80%, 85%, 90% or 95% identical to at least 50 amino acids of such domains. In some or any of the embodiments herein, the PDZ Domain is an InaD PDZ1 Domain as defined herein.

[0016] In some or any of the embodiments herein, the polynucleotide encoding a cell surface protein fused to a PDZ Domain further encodes an enhancer domain. In example embodiments, the enhancer domain is a variant of the 10^{th} fibronectin type III domain of human fibronectin (FN3), for example, an amino acid sequence at least 80%, 85%, 90% or 95% identical to at least 50 amino acids of FN3.

[0017] In some or any of the embodiments herein, the polynucleotide encoding a cell surface protein fused to a PDZ Domain and/or the polynucleotide encoding a protein of interest (e.g., an antibody, or antigen-binding fragment thereof), fused to a PDZ-binding peptide further encodes a fluorescent marker protein.

[0018] In some or any of the embodiments herein, the host cell is selected from the group consisting of a eukaryotic cell and a prokaryotic cell. In some or any of the embodiments herein, the eukaryotic cell is a yeast cell or a mammalian cell.

[0019] In example embodiments, the yeast cell is selected from the group consisting of S. cerevisiae, P. pastoris, C. albicans, H. polymorpha, Y. lipolitica, and S. pombe.

[0020] In example embodiments, the prokaryotic cell is selected from the group consisting of Escherichia coli, Salmonella typhimurium, Bacillus subtilis, Pseudomonas aeruginosa, and Serratia marcescans.

[0021] In example embodiments, the mammalian cell is selected from the group consisting of CHO cells, COS-7 cells, human embryonic kidney line (293, or variants thereof, e.g., 293E, 293T, or 293 cells subcloned for growth in suspension culture), BHK cells, TM4 cells, CV1 cells, VERO-76 cells, HeLa cells, MDCK cells, BRL 3A cells, W138 cells, Hep G2 cells, MMT cells, TR1 cells, MRC 5 cells, FS4 cells, and Hep G2 cells.

[0022] In example embodiments, when the host cell is a yeast cell, the cell surface protein is a cell wall protein, for example, Aga1, Aga2, Aga1, Cwp1, Cwp2, Gas1p, Yap3p, Flo1p, Crh2p, Pir1, Pir2, Pir3, or Pir4, or a fragment or variant of any of these proteins.

[0023] In example embodiments, when the host cell is a prokaryotic cell, the cell surface protein is an outer membrane protein, for example, FliC, pullulunase, OprF, OprI, PhoE, MisL, or cytolysin, or a fragment or variant of any of these proteins.

[0024] In example embodiments, when the host cell is a mammalian cell, the cell surface protein comprises any suitable transmembrane domain of any known cell membrane proteins, or a polypeptide with a GPI anchor sequence, or a fragment or variant thereof, or a non-cleavable type II signal anchor sequence.

[0025] In example embodiments, the fragments of such cell wall proteins are at least about 20, 25, 30, 35, 40, 45, 50, 60, 70, 80, 90, 100, 120, 140, 160, 180, or 200 amino acids in length. In example embodiments, the variants thereof comprise an amino acid sequence at least 80%, 85%, 90% or 95% identical to at least 100 amino acids of such domains.

[0026] In some or any of the embodiments herein, the antibody is a tetrameric IgG immunoglobulin comprising two heavy chains and two light chains.

[0027] In some or any of the embodiments herein, the antigen-binding fragment of the antibody comprises at least the heavy chain variable region and/or the light chain variable region. In example embodiments, the antigen-binding fragment of the antibody comprises a Fab, or an scFv.

[0028] In some or any of the embodiments herein, the polynucleotide encoding a cell surface protein fused to a PDZ Domain further comprises a signal sequence directing the cell surface protein to the cell surface.

[0029] In example embodiments, the signal sequence is an Aga2 signal sequence when the host cell is a yeast cell. In various embodiments, the signal sequence is derived from Mating Factor α1 (MFα1), Invertase (SUC2), Acid phosphatase (PHOS), Beta glucanase (BGL2), Inulinase (INU1A), AGA1, AGα1, FLO1, GAS1, CWP1, or CWP2, or a fragment or variant thereof.

[0030] In some or any of the embodiments herein, the PDZ Domain-PDZ binding peptide interaction has a K_{d} of about 100 nM or less (where a lower number indicates stronger binding affinity). In various embodiments, the PDZ Domain-PDZ binding peptide interaction has a K_{d} of about 100 nM or less, about 120 nM or less, about 140 nM or less, about 160 nM or less, about 180 nM or less, about 200 nM or less, about 240 nM or less, about 280 nM or less, about 300 nM or less, about 350 nM or less, about 400 nM or less, about 450 nM or less, about 500 nM or less, about 600 nM or less, about 700 nM or less, about 800 nM or less, about 900 nM or less, about 1 μM or less, about 10 μM or less, about 100 μM or less, or about 500 μM or less.

[0031] The polynucleotides of the disclosure may be operably linked to promoters, enhancers or one or more other transcriptional regulatory sequences, optionally as part of a vector comprising these sequences. Host cells comprising such polynucleotides or vectors may be prepared using methods known in the art or described herein.

[0032] Methods of using such host cells to display the protein of interest on the host cell surface may involve culturing the host cells for a time and under conditions that permit the expression of the encoded fusion proteins and linkage of the fusion proteins in a manner to display the protein of interest on the cell surface.

[0033] In another aspect, the invention contemplates a plurality of cells comprising at least 10̂3, at least 10̂4, at least 10̂5, at least 10̂6, at least 10̂7, at least 10̂8, at least 10̂9, or at least 10̂10 different eukaryotic host cells according to any of the preceding embodiments, each such eukaryotic host cell expressing on its surface a different protein of interest (e.g., polypeptide binding agent, or antibody, or antigen-binding fragment thereof).

[0034] In yet another aspect, the invention provides a method of displaying at least 10̂3, at least 10̂4, at least 10̂5, at least 10̂6, at least 10̂7, at least 10̂8, at least 10̂9, or at least 10̂10 different proteins of interest (e.g., polypeptide binding agents or antibodies, or antigen-binding fragments thereof), on cell surfaces, comprising culturing the plurality of cells described herein.

[0035] In some or any of the embodiments herein, the PDZ Domain and the PDZ-binding peptide interact and are linked by at least one disulfide bond. In a related embodiment, each of the PDZ Domain and the PDZ-binding peptide comprise a Cys residue that permits linkage by disulfide bonding. In some example embodiments, the Cys is a native amino acid, while in other example embodiments a native amino acid within the PDZ Domain and/or PDZ-binding peptide is replaced with a Cys. In some example embodiments, a Cys residue is located at the −1 position of the PDZ-binding peptide.

[0036] In a related aspect, the disclosure provides methods of using the plurality of host cells expressing different proteins of interest, involving screening for one or many proteins of interest that bind to an antigen.

[0037] In some or any of the embodiments herein, the method further comprises contacting the plurality of cells with an antigen. In another embodiment, the method further comprises selecting cells which bind to the antigen.

[0038] In some or any of the embodiments of the method, the selection is through fluorescence-activated cell sorting (FACS), bead-based sorting, or solid phase panning. In a related embodiment, the bead-sorting is magnetic-activated cell sorting (MACS). Methods of carrying out the selection are described in greater detail in the detailed description.

[0039] In another aspect, there is provided a method of selecting an antibody, or antigen-binding fragment thereof, comprising: (a) contacting a plurality of phage displaying antibody or antigen-binding fragments with an antigen, and selecting phage which bind to the antigen, and (b) contacting the plurality of yeast cells displaying an antibody or antigen binding fragment thereof with said antigen, and selecting cells which bind to the antigen.

[0040] In another aspect, there is provided a method of selecting an antibody, or antigen-binding fragment thereof, comprising: (a) contacting a plurality of phage displaying antibody or antigen-binding fragments with an antigen, and selecting phage which bind to the antigen, and (b) contacting the plurality of mammalian cells displaying an antibody or antigen binding fragment thereof with said antigen, and selecting cells which bind to the antigen.

[0041] In another aspect, there is provided a method of selecting an antibody, or antigen-binding fragment thereof, comprising: (a) contacting a plurality of yeast cells displaying an antibody or antigen binding fragment thereof with an antigen, and selecting cells which bind to the antigen, and (b) contacting the plurality of mammalian cells displaying an antibody or antigen binding fragment thereof with said antigen, and selecting cells which bind to the antigen. In some or any of the embodiments herein, the method further comprises the step of contacting a plurality of phage displaying antibody or antigen-binding fragments with an antigen, and selecting phage which bind to the antigen.

[0042] It is understood that each feature or embodiment, or combination, described herein is a non-limiting, illustrative example of any of the aspects of the invention and, as such, is meant to be combinable with any other feature or embodiment, or combination, described herein. For example, where features are described with language such as “one embodiment,” “some embodiments,” “further embodiment,” “specific exemplary embodiments,” and/or “another embodiment,” each of these types of embodiments is a non-limiting example of a feature that is intended to be combined with any other feature, or combination of features, described herein without having to list every possible combination. Such features or combinations of features apply to any of the aspects of the invention. Similarly, where the disclosure describes polynucleotides encoding polypeptides characterized by certain features, polypeptides characterized by those features, host cells expressing such polypeptides, and all related methods of using such host cells are also contemplated by the disclosure. Where examples of values falling within ranges are disclosed, any of these examples are contemplated as possible endpoints of a range, any and all numeric values between such endpoints are contemplated, and any and all combinations of upper and lower endpoints are envisioned.

[0043] Numerous additional aspects and advantages of the invention will become apparent to those skilled in the art upon consideration of the following detailed description of the invention which describes presently preferred embodiments thereof. All U.S. patents, U.S. patent application publications, U.S. patent applications, foreign patents, foreign patent applications, and non-patent publications referred to in this application, are incorporated herein by reference, in their entireties.

### BRIEF DESCRIPTION OF THE DRAWINGS

[0044] FIG. 1 shows the yeast vector pTam15 in which DNA coding for XPA28 scFv is fused to DNA coding for the mature Aga2 protein (19-87).

[0045] FIG. 2 shows yeast vector pTam16 in which the first PDZ domain of InaD (amino acids 11-107 of SEQ ID NO: 3) (InaD PDZ1) is fused to Aga2.

[0046] FIG. 3 shows the yeast vector pTam28 in which DNA coding for XPA28 scFv is fused to DNA coding for the C-terminal seven residues of NorpA (amino acids 1089-1095 of SEQ ID NO: 1) (NorpA tether). Included also in the vector is DNA coding for the InaD PDZ1/Aga2 fusion protein. Both proteins are expressed concurrently using identical GAL1 promoters.

[0047] FIG. 4 shows flow cytometric analysis of yeast cells transformed with pTam28 (A), pTam15 (B) and pTam16 (C). Induced cells were incubated with biotinylated IL-1β and a c-Myc antibody. Bivariate plots of PE and Alexa Fluor 647 fluorescence show the correlation between antigen binding and scFv expression. The number of cells in each quadrant is shown as a percentage of total.

[0048] FIG. 5 shows dose-dependent binding of IL-β by yeast cells transformed with pTam15 and pTam28. The K_{D} was determined by a plot of the mean PE fluorescence (percentage of total) against IL-1β concentration.

[0049] FIG. 6 shows the yeast vector pTam32 in which DNA coding for XPA28 scFv is fused to DNA coding for the mature Aga1 protein (amino acids 23-725 of SEQ ID NO: 8).

[0050] FIG. 7 shows bivariate plots of IL-1β binding and c-Myc staining of yeast cells transformed with pTam15 (A) and 32 (B) as measured by PE and Alexa Fluor 647 fluorescence. The number of cells in each quadrant is shown as percentage of total.

[0051] FIG. 8 shows the yeast vector pTam34 in which XPA28 scFv is expressed with the NorpA tether and the DNA coding for InaD PDZ1 is fused to DNA coding for the Aga1 protein.

[0052] FIG. 9 shows bivariate plots of IL-1β binding and c-Myc staining of yeast cells transformed with pTam28 (A) and 34 (B) as measured by PE and Alexa Fluor 647 fluorescence. The number of cells in each quadrant is shown as a percentage of total.

[0053] FIG. 10 shows the yeast vector pTam35 which is similar to the parental vector pTam34 with the exception that the detection tag on the InaD PDZ1/Aga1 fusion has been changed from c-Myc to HA epitope.

[0054] FIG. 11 shows the IL-1β binding, c-Myc and HA staining properties of cells transformed with pTam35 as measured by PE (A), Alexa Fluor 647 (B) and Alexa Fluor 488 (C) fluorescence respectively. Both uninduced (grey fill) and induced (no fill) cells are shown.

[0055] FIG. 12 shows the yeast vector pTam37 which is similar to the parental vector pTam35 with the exception that the c-Myc epitope now precedes the His6 tag at the C-terminus of XPA28 scFv.

[0056] FIG. 13 shows the IL-1β binding, c-Myc and HA staining properties of cells transformed with pTam37 as measured by PE (A), Alexa Fluor 647 (B) and Alexa Fluor 488 (C) fluorescence respectively. Both uninduced (grey fill) and induced (no fill) cells are shown.

[0057] FIG. 14, Panel A shows the mammalian vector pXIBM14 for expression of XPA28 IgG using a single promoter and IRES2 preceding the light and heavy chain respectively. Secreted XPA IgG was purified by Protein A Sepharose and analyzed by reducing SDS-PAGE (B).

[0058] FIG. 15, Panel A shows a series of mammalian vectors pXIBM32, 34, and 36 in which the NorpA tether has been fused to the C-terminus of the IgG1 heavy chain with either no amino acids, three amino acid (GAA), or five amino acid (GGGGS) spacer, respectively. Panel B shows the mammalian vector pTam29 in which the InaD PDZ1 is fused to the transmembrane domain of PDGFR β (amino acid residues 513-561 of SEQ ID NO: 9).

[0059] FIG. 16 shows flow cytometric analysis of HEK293 cells transfected with pXIBM14 alone (A), pTam29 alone (B), pXIBM32 and pTam29 (C), pXIBM34 and pTam29 (D), and pXIBM36 and pTam29 (E). Cells were incubated with biotinylated IL-1β and stained with a c-Myc antibody. Bivariate plots of PE and Alexa Fluor 647 fluorescence shows the correlation between antigen binding and InaD PDZ1 expression. The number of cells in each quadrant is shown as a percentage of total.

[0060] FIG. 17 shows reducing SDS-PAGE analysis of purified XPA IgG from cells transfected with pXIBM14 (− NorpA tether) and pXIBM32 (+ NorpA tether).

[0061] FIG. 18 shows the modifications to pTam37 resulting in the following vectors: (1) pTam49 which contains the C1094S mutation in the NorpA tether; (2) pTam50 which contains the C31S mutation in InaD PDZ1; (3) pTam51 which contains a TGATGA insertion between the Aga2 signal sequence and InaD PDZ1; and (4) pTam52 which contains a TGATGA insertion between Aga2 signal sequence and XPA28 scFv.

[0062] FIG. 19 shows the flow cytometric analysis of BJ5465 cells transformed with pTam37 (A), pTam49 (B), pTam50 (C), pTam51 (D), and pTam52 (E). Cells were incubated with biotinylated IL-1β and stained with a HA antibody. Bivariate plots of PE and Alexa Fluor® 488 fluorescence show the correlation between antigen binding and InaD PDZ1 expression.

[0063] FIG. 20 shows four successive rounds (A-D) of library enrichment for transferrin binders using FACS. Cells were incubated with biotinylated transferrin and stained with a HA antibody. Bivariate plots of PE and Alexa Fluor 488 fluorescence show the correlation between antigen binding and InaD PDZ1 expression. Sorting gates used during FACS are indicated and the number of collected cells is shown as a percentage of parent population.

[0064] FIG. 21 shows an estimation of affinity for transferrin for three scFv clones isolated after four rounds of library enrichment. The mean PE fluorescence is plotted against transferrin concentration in order to derive the estimated K_{D}, which is shown.

[0065] FIG. 22 shows the vector pTam48.

[0066] FIG. 23 shows the vector pVV47, which displays anti-IL-1β Fab.

[0067] FIG. 24 shows the vector pVV42, which displays anti-IL-1β IgG.

[0068] FIG. 25 shows flow cytometric analysis of yeast cells transformed with different anti-IL-1β fragments: pTam37 (scFv), pVV47 (Fab) and pVV42 (IgG). In each panel, >80% of galactose-induced cells are positive for both anti-HA antibody (the detection tag on the InaD PDZ1/Aga1 fusion) and biotin-IL-1β.

[0069] FIG. 26 shows flow cytometric analysis of transfected HEK293E cells (A) before and (B) after magnetic cell separation. Cells were transfected with DNA corresponding to IgGs enriched for Tie2 binding following three rounds of phage panning. Bivariate plots of PE and Alexa Fluor® 647 shows the correlation between Tie2 binding and InaD PDZ1 expression. The number of cells in each quadrant is shown as a percentage of the total.

[0070] FIG. 27 shows relative levels of AKT phosphorylation at serine 473 of CHOK1-Tie2 cells treated with Ang1 and ten anti-Tie2 IgGs (A3, A10, A11, B1, B4, B6, B8, B12, C3, and C4). Anti-KLH treated and untreated cells were included as negative controls. Also shown are dissociation constants for several of the IgGs for soluble Tie2, as determined by Biacore.

[0071] FIG. 28 illustrates an IgG yeast display library constructed from round 3 output from phage Fab library and panned against Tie-2. FACS of the yeast library isolated three populations of cells double positive for antigen binding (detected by biotinylated Tie-2-Fc labeled with streptavidin-PE) and antibody display (detected by APC-tagged anti-lambda).

### DETAILED DESCRIPTION

[0072] This invention relates to materials and methods useful for displaying proteins of interest, including antibodies, on the surface of a cell. Both prokaryotic and eukaryotic cells capable of displaying proteins on the cell surface are provided. The methods and materials provided in this disclosure relate to the interaction between a fusion of the protein of interest to a PDZ-binding peptide and a fusion of a PDZ Domain to a cell surface protein, to display a protein of interest on the surface of a cell. One advantageous aspect of the invention is that the small size of the PDZ-binding peptides causes less potential interference with folding and solubility of the proteins of interest, particularly when the protein of interest is multimeric and may comprise more than one different polypeptide chain. For example, there will be less interference with antibody assembly and binding to antigen, and fusion proteins comprising antibodies or antigen-binding fragments thereof with PDZ-binding peptides are easily isolated or purified and tested separately (not in association with the host cell) for binding to antigen. The examples herein show that the materials and methods of the disclosure permit tetrameric immunoglobulins comprising two heavy chains and two light chains to be expressed on the cell surface.

[0073] Another potential advantage is the ability to rely on fluorescent-activated cell sorting techniques to enrich and segregate cells that exhibit strong binding properties, which permits identification of rarer clones expressing candidate proteins of interest, e.g., antibodies, such as candidates occurring at frequencies below 10⁻⁶. Another potential advantage is the ability to display different proteins of interest on the same cell. For example, different proteins of interest may be cloned, each with a NorpA tether, and expressed with a single copy of an InaD PDZ1 domain/Aga 1 fusion. Yet another potential advantage of the present invention compared to other techniques based on linkage to cell surface proteins is the ability to prepare relatively large libraries with increased diversity.

### A. DEFINITIONS

[0074] As used herein, an antibody that “specifically binds” is “antigen specific”, is “specific for” antigen or is “immunoreactive” with an antigen refers to an antibody or polypeptide binding agent of the invention that binds an antigen with greater affinity than other antigens of unrelated to similar sequence, preferably at least 10³, 10⁴, 10⁵, or 10⁶ greater affinity. In one aspect, the antibody or polypeptide binding agents of the invention, or fragments, variants, or derivatives thereof, will bind with a greater affinity to human antigen as compared to its binding affinity to similar antigens of other, i.e., non-human, species, but polypeptide binding agents that recognize and bind orthologs of the target are contemplated.

[0075] For example, a polypeptide binding agent that is an antibody or fragment thereof “specific for” its cognate antigen indicates that the variable regions of the antibodies recognize and bind the desired antigen with a detectable preference (e.g., where the desired antigen is a polypeptide, the variable regions of the antibodies are able to distinguish the antigen polypeptide from other known polypeptides of the same family, by virtue of measurable differences in binding affinity, despite the possible existence of localized sequence identity, homology, or similarity between family members). It will be understood that specific antibodies may also interact with other proteins (for example, S. aureus protein A or other antibodies in ELISA techniques) through interactions with sequences outside the variable region of the antibodies, and in particular, in the constant region of the molecule. Screening assays to determine binding specificity of a polypeptide binding agent, e.g. antibody, for use in the methods of the invention are well known and routinely practiced in the art. For a comprehensive discussion of such assays, see Harlow et al. (Eds), Antibodies: A Laboratory Manual; Cold Spring Harbor Laboratory; Cold Spring Harbor, N.Y. (1988), Chapter 6. Antibodies for use in the invention can be produced using any method known in the art and described in greater detail herein.

[0076] The term “epitope” refers to that portion of any molecule capable of being recognized by and bound by a selective binding agent at one or more of the antigen binding regions. Epitopes usually consist of chemically active surface groupings of molecules, such as, amino acids or carbohydrate side chains, and have specific three-dimensional structural characteristics as well as specific charge characteristics. Epitopes as used herein may be contiguous or non-contiguous.

[0077] The term “derivative” when used in connection with polypeptides (e.g., proteins of interest, polypeptide binding agents or antibodies or antigen-binding fragments thereof) refers to polypeptides chemically modified by such techniques as ubiquitination, glycosylation, deglycosylation, conjugation to therapeutic or diagnostic agents, labeling (e.g., with radionuclides or various enzymes), covalent polymer attachment such as pegylation (derivatization with polyethylene glycol) and insertion or substitution by chemical synthesis of amino acids such as ornithine, which do not normally occur in human proteins. Derivatives retain the binding properties of underivatized molecules of the invention.

[0078] “Detectable moiety” or a “label” refers to a composition detectable by spectroscopic, photochemical, biochemical, immunochemical, or chemical means. For example, useful labels include ³²P, ³⁵S, fluorescent dyes, electron-dense reagents, enzymes (e.g., as commonly used in an ELISA), biotin-streptavadin, dioxigenin, haptens and proteins for which antisera or monoclonal antibodies are available (e.g., c-myc, HA), or nucleic acid molecules with a sequence complementary to another labeled nucleic acid molecule. The detectable moiety often generates a measurable signal, such as a radioactive, chromogenic, or fluorescent signal, that can be used to quantitate the amount of bound detectable moiety in a sample.

[0079] The term “host cell” is understood to refer not only to the particular subject cell or cells but also the progeny thereof. It is also understood that, during culture, natural or accidental mutations may occur in succeeding generations and thus such progeny may not be completely identical to the parent cell, but are still included within the scope of the term as used herein.

[0080] The term “operably linked” refers to a functional relationship between two or more polynucleotide (e.g., DNA) segments. Typically, it refers to the functional relationship of a transcriptional regulatory sequence to a transcribed sequence. For example, a promoter/enhancer sequence of the invention, including any combination of cis-acting transcriptional control elements, is operably linked to a coding sequence if it stimulates or modulates the transcription of the coding sequence in an appropriate host cell or other expression system. Generally, promoter transcriptional regulatory sequences that are operably linked to a transcribed sequence are physically contiguous to the transcribed sequence, i.e., they are cis-acting. However, some transcriptional regulatory sequences, such as enhancers, need not be physically contiguous or located in close proximity to the coding sequences whose transcription they enhance. A polylinker provides a convenient location for inserting coding sequences so the genes are operably linked to a promoter. Polylinkers are polynucleotide sequences that comprise a series of three or more closely spaced restriction endonuclease recognition sequences.

[0081] The term “signal sequence” refers to a polynucleotide sequence which encodes a short amino acid sequence (i.e., signal peptide) present at the NH₂-terminus of certain proteins that are normally exported by cells to noncytoplasmic locations (e.g., secretion) or to be membrane components. Signal peptides direct the transport of proteins from the cytoplasm to noncytoplasmic locations.

[0082] As used herein “binding” is the physical association between two or more distinct molecular entities that results from a specific network of non-covalent interactions consisting of one or more of the weak forces including hydrogen bonds, Van der Waals, ion-dipole and hydrophobic interactions and the strong force ionic bonds. The level or degree of binding may be measured in terms of affinity. Affinity, or “binding affinity”, is a measure of the strength of the binding interaction between two or more distinct molecular entities that can be defined by equilibrium binding constants or kinetic binding rate parameters. Examples of suitable constants or parameters and their measurement units are well known in the art and include but are not limited to equilibrium association constant (K_{A}), e.g. about 10⁵M⁻¹ or higher, about 10⁶M⁻¹ or higher, about 10⁷M⁻¹ or higher, about 10⁸M⁻¹ or higher, about 10⁹M⁻¹ or higher, about 10¹⁰M⁻¹ or higher, about 10¹¹ M⁻¹ or higher or about 10¹²M⁻¹ or higher; equilibrium dissociation constant (K_{D}), e.g., about 10⁻⁵M or less, or about 10⁻⁶M or less, or about 10⁻⁷M or less, or about 10⁻⁸M or less, or about 10⁻⁹M or less, or about 10⁻¹⁰M or less, or about 10⁻¹¹M or less, or about 10⁻¹²M or less; on-rate (e.g., sec⁻¹, mol⁻¹) and off-rate (e.g., sec⁻¹)). In the case of K_{A}, higher values mean “stronger” or “strengthened” or “greater” binding affinity while in the case of K_{D}, lower values mean “stronger” or “strengthened” or “greater” binding affinity. As used herein, a “strengthened” binding rate parameter means increased residency time, faster association or slower dissociation. As used herein, a “weakened” binding rate parameter means decreased residency time, slower association or faster dissociation.

[0083] Affinity between two compounds, e.g. between an antibody and an antigen, may be measured directly or indirectly. Indirect measurement of affinity may be performed using surrogate properties that are indicative of, and/or proportional to, affinity. Such surrogate properties include: the quantity or level of binding of a first component to a second component, or a biophysical characteristic of the first component or the second component that is predictive of or correlated to the apparent binding affinity of the first component for the second component. Specific examples include measuring the quantity or level of binding of first component to a second component at a subsaturating concentration of either the first or the second component. Other biophysical characteristics that can be measured include, but are not limited to, the net molecular charge, rotational activity, diffusion rate, melting temperature, electrostatic steering, or conformation of one or both of the first and second components. Yet other biophysical characteristics that can be measured include determining stability of a binding interaction to the impact of varying temperature, pH, or ionic strength.

[0084] Measured affinity is dependent on the exact conditions used to make the measurement including, among many other factors, concentration of binding components, assay setup, valence of binding components, buffer composition, pH, ionic strength and temperature as well as additional components added to the binding reaction such as allosteric modulators and regulators. Quantitative and qualitative methods may be used to measure both the absolute and relative strength of binding interactions.

### B. PDZ DOMAINS AND PDZ-BINDING PEPTIDES

[0085] 1. PDZ Domains

[0086] The present invention provides methods and cells useful for displaying proteins, including antibodies and antibody fragments, on the surface of cells using fusion proteins comprising a cell surface protein fused to a PDZ Domain. PDZ domains were originally described as containing conserved structural elements among the 95 kDa post-synaptic density protein (PSD-95), the Drosophila tumor suppressor discs-large (dlg), and the tight junction protein zonula occludens-1 (ZO-1). These domains are found in a large and diverse set of proteins. They generally bind to short carboxyl-terminal peptide sequences located on the carboxyl-terminal end of interacting proteins, but may also bind to internal sequences.

[0087] PDZ domains are generally composed of a 5- to 6-stranded anti-parallel β-barrel and 2-3 α-helices. Helix α2 and strand β2 form either side of the conserved peptide binding cleft within the PDZ domain fold. The loop between the β1 and β2 strands forms the C-terminal carboxylate binding loop. C-terminal peptides (e.g., PDZ-binding peptides) bind as an antiparallel β strand in a groove formed by helix α2 and strand β2. The conserved Gly-Leu-Gly-Phe (GLGF) sequence of the PDZ domain is found within the β1 and β2 connecting loop and is important for hydrogen bond coordination of the C-terminal carboxylate group. The N- and C-termini of the PDZ domain are located near each other on the opposite side of the PDZ domain from the peptide-binding site.

[0088] Hung and Sheng (J. Biol. Chem., 277:8, 5699-5702 (2002)) classified PDZ domains into three classes based on binding specificity for their peptide ligands. The binding specificity of PDZ domains is generally determined by the interaction of the first residue of helix α2 and the side chain of the −2 residue of the C-terminal PDZ-binding ligand (numbering based on C-terminal amino acid being the “0” position). In Class I PDZ interactions, such as those of PSD-95, a serine or threonine residue occupies the −2 position of the PDZ-binding ligand. The side chain hydroxyl group forms a hydrogen bond with the N-3 nitrogen of a histidine residue at position α2-1 (the first residue of the second alpha helix, a2), which is highly conserved among Class I PDZ domains. In contrast, class II PDZ interactions are characterized by hydrophobic residues at both the −2 position of the PDZ-binding peptide ligand and the α2-1 position of the PDZ domain. A third class of PDZ domains, such as in neuronal nitric-oxide synthase (nNOS), prefers negatively charged amino acids at the −2 position of the PDZ-binding ligand. This specificity is determined by the coordination of the hydroxyl group of a tyrosine residue at position α2-1 with the side chain carboxylate of the −2 residue of the PDZ-binding ligand. PDZ domains generally interact with the C-terminal 3-4 amino acids of their protein targets, including the free carboxylate group (Hillier et al., (1999) Science 284: 812-815). Type I PDZ domains bind to the consensus sequence S/T-X-V/L, where X is any residue (Doyle et al., (1996) Cell 85: 1067-1076; Songyang et al., (1997) Science 275: 73-77), while type II PDZ domains bind to the more general sequence Φ-X-Φ, where Φ is usually a large, hydrophobic residue (Daniels et al., (1998) Nat. Struct. Biol. 5: 317-325).

[0089] PDZ domain classification has been extended beyond the three classes described above using sequence- and structure-based information, allowing improved prediction of PDZ domain specificity and design of novel PDZ domain/peptide interactions (Tonikian et al., (2008) PLos Biol 6: e239; Kaufmann et al., J. Mol. Model. (2011) 17: 315-324).

[0090] In contrast to the majority of PDZ domains, some PDZ domains interact with internal peptide sequences. For example, the PDZ domain of PSD-95 interacts with an internal region of nNOS. In the crystal structure of the nNOS-PSD-95 PDZ complex, amino acid residues adjacent to the canonical PDZ domain of nNOS form a two-stranded β-hairpin “finger,” which docks in the peptide-binding groove of the PSD-95 PDZ domain. The sharp β turn of the β-finger binds to the same site as the terminal carboxylate group of peptide ligands. PDZ domains that bind internal peptides (i.e., peptides not at the C-terminus) are considered within the scope of the present invention.

[0091] As used herein, the term “PDZ Domain” refers to a domain of a protein that comprises one or more of these conserved structural elements described above characteristic of PDZ domains, e.g., the helix α2 and strand β2 which form the conserved peptide binding cleft, the loop between the β1 and β2 strands which forms the C-terminal carboxylate binding loop, the GLGF repeat, the N-3 containing histidine residue at position 1 of helix α2 (or conservative substitution thereof that contains a suitable nitrogen) which is highly conserved among Class I PDZ domains, the hydrophobic residues at position 1 of helix α2, which is highly conserved among Class II PDZ domains, and/or the hydroxyl-containing tyrosine residue at position 1 of helix α2 (or conservative substitution thereof that contains an hydroxyl), which is highly conserved among Class III PDZ domains, as well as fragments, extensions, or variants thereof. In example embodiments, the fragments are at least about 20, 25, 30, 35, 40, 45, 50, 55, 60, 65, 70, 75, 80 or more amino acids in length. In example embodiments, the extension is at least about 5, 6, 7, 8, 9, 10, 11, 12, 13, 14, 15, about 20, about 25, or about 30 amino acids in length. In example embodiments, the extension comprises residues 394-399 of SEQ ID NO: 6. In example embodiments, the variants comprise an amino acid sequence at least 80%, 85%, 90% or 95% identical to at least 50 amino acids of such domains, and preferably one or more of the conserved elements identified above is retained. For example, the helix α2 and strand β2 which form the conserved peptide binding cleft are retained, and optionally the GLGF repeat, the N-3 containing histidine residue at position 1 of helix α2 (or conservative substitution thereof that contains a suitable nitrogen) which is highly conserved among Class I PDZ domains, the hydrophobic residues at position 1 of helix α2, which is highly conserved among Class II PDZ domains, and/or the hydroxyl-containing tyrosine residue at position 1 of helix α2 (or conservative substitution thereof that contains an hydroxyl), which is highly conserved among Class III PDZ domains, is (are) also retained. The term “PDZ Domain” includes but is not limited to a PDZ domain of a post synaptic density 95 (PSD-95) (SEQ ID NO: 10), tumor suppressor discs-large (dlg) (SEQ ID NO: 11), tight junction protein zonular occludens (ZO-1) (SEQ ID NO: 12), InaD (SEQ ID NO: 2), a Dishevelled 1-like (DVL1L) (SEQ ID NO: 3), a proTGF-alpha cytoplasmic domain-interacting proteins 18 (TACIP18) (SEQ ID NO: 4), a similar to TACIP18 (SITAC) (SEQ ID NO: 5), a PDZ-like domain, a PDZ dimer, a tandem PDZ domain (Lee & Zheng, Cell Communication and Signaling 2010 8: 8), a PSD-95/SAP90 PDZ3 domain (SEQ ID NO: 6), and an Erbin (SEQ ID NO: 7), or fragments, extensions (Petit et al., PNAS 106: 18249-54 (2009) and Wang et al., Protein Cell 1: 737-51 (2010)), or variants thereof that can associate with a PDZ binding peptide described herein. In any of these embodiments, a PDZ domain (e.g., PDZ1 of InaD or TACIP18 or SITAC) which naturally comprise a Cys are contemplated. The term “PDZ Domain” also includes vertebrate homologs of PDZ1 family members, including, but not limited to mammalian and avian homologs. Representative mammalian homologs of PDZ domain family members include, but are not limited to murine and human homologs, or invertebrate proteins, such as from Drosophila melanogaster. In example embodiments, the fragments of the PDZ domains included within the term “PDZ Domains” are at least about 20, 25, 30, 35, 40, 45, 50, 55, 60, 65, 70, 75, 80 or more amino acids in length. In example embodiments, the variants included within the term “PDZ Domains” comprise an amino acid sequence at least 80%, 85%, 90% or 95% identical to at least 50 amino acids of such PDZ domains. In some embodiments, one or more of the conserved elements identified above is retained.

[0092] PDZ1 domain from Inactivation no after-potential D (InaD), which shares the general PDZ domain topology, is set forth as amino acids 11 through 107 of SEQ ID NO: 2. InaD is a critical protein in the Drosophila phototransduction pathway, a well-characterized G protein-coupled, phospholipase C-mediated signaling cascade (Scott & Zuker, (1998) Nature 395: 805-808; Xu et al., (1998) J. Cell Biol. 142: 545-555; Scott et al., (1995) Neuron 15: 919-927). InaD is composed nearly completely of five PDZ domains (van Huizen et al., (1998) EMBO J. 17: 2285-2297; Tsunoda et al., (1997) Nature 388: 243-249; Shieh et al., (1997) Proc. Natl. Acad. Sci. U.S.A. 94: 12682-12687), so named for the first three proteins in which this domain was characterized: Post-synaptic density 95, Discs-large, and Zonular occludens (Kennedy, (1995) Trends Biochem Sci 20: 350; Morais Cabral et al., (1996) Nature 382: 649-652; Doyle et al., (1996) Cell 85: 1067-1076). Each of the PDZ domains of InaD has been implicated in binding one or more of the proteins involved in phototransduction, bringing the complex together in the proper cellular location for efficient signaling (Tsunoda et al., (1997) Nature 388: 243-249; Wes et al., (1999) Nat Neurosci 2: 447-453; Montell, (1999) Annu Rev Cell Dev Biol 15: 231-268; Fanning & Anderson, (1999) Curr. Opin. Cell Biol. 11: 432-439).

[0093] The InaD protein of Drosophila comprises 674 amino acids (SEQ ID NO: 2), has a molecular weight of 74,332 daltons and comprises five PDZ domains. These five PDZ domains form the majority of the protein's structure. The domains are numbered PDZ1 through PDZ5. PDZ1, the N-terminal domain of InaD, comprises residues 11-107 of the InaD protein. In the disclosure presented herein PDZ1 is referred to specifically in some embodiments; however, the disclosure and discussion of embodiments, methods, and techniques can also be applied to another PDZ domain, such as PDZ2, PDZ3, PDZ4, and PDZ5.

[0094] The PDZ1 domain of InaD is known to bind the C-terminus of NorpA (SEQ ID NO: 1). This interaction is mediated by a disulfide bond formed between these two proteins. The disulfide bond is formed between Cys(−1) of NorpA (numbering based on C-terminal amino acid being the “0” position) and Cys 31 of the InaD PDZ1.

[0095] In one embodiment a PDZ Domain (e.g., a PDZ1 domain) useful according to the present invention is derived from the InaD protein found in Drosophila, i.e., “InaD PDZ1 Domain”, and is fused to a cell surface protein. “InaD PDZ1 Domain” includes fragments of the InaD PDZ1 domain (amino acids 11-107) that are at least about 20, 25, 30, 35, 40, 45, 50, 55, 60, 65, 70, 75, 80 or more amino acids in length, and variants thereof that comprise an amino acid sequence at least 80%, 85%, 90% or 95% identical to at least 50 amino acids of the InaD PDZ1 domain. In some embodiments, one or more of the conserved elements identified above is retained, It is contemplated that a PDZ Domain (e.g., a PDZ1 domain) of the present invention is derived from any species, including but not limited to, Drosophila melanogaster, Caenorhabditis elegans, Calliphora vicina, Homo sapiens, Mus musculus, and any other species having PDZ domains.

[0096] In one embodiment, the PDZ Domain comprises a Cys residue in the peptide-binding cleft. In one embodiment, the PDZ Domain comprising a Cys residue is a Dishevelled 1-like (DVL1L) PDZ. In another embodiment, the PDZ Domain comprising a Cys residue is a proTGF-alpha cytoplasmic domain-interacting proteins 18 (TACIP18) PDZ1. In another embodiment, the PDZ Domain comprising a Cys residue is a similar to TACIP18 (SITAC) PDZ1.

[0097] In various embodiments, the PDZ Domain is about 80 to about 100 amino acids in length. In similar embodiments, the PDZ Domain is 80, 81, 81, 83, 84, 85, 86, 87, 88, 89, 90, 91, 92, 93, 94, 95, 96, 97, 98, 99, 100, 101, 102, 103, 104, 105, 106, 107, 108, 109, 110, 111, 112, 113, 114, 115, 116, 117, 118, 119, or 120 amino acids in length, or any range between any of these endpoints.

[0098] In one embodiment, the PDZ Domain further comprises an enhancer domain. Huang et al. (Proc. Nat'l Acad. Sci. USA, 105:18, 6578-83 (2008); incorporated by reference it its entirety) described a system whereby PDZ domains could be engineered to generate binding sites with substantially improved binding affinity for native PDZ-binding peptides. The authors fused the 91 amino acid residue 10^{th} fibronectin type III domain of human fibronectin (FN3) to the 96 amino acid residue Erbin PDZ domain. The authors then constructed a phage-display library in which the three surface loops of FN3 were diversified. Several clones were identified exhibiting enhanced affinity to the ARVCF peptide. Such FN3 domains creating PDZ fusions with enhanced affinity for PDZ-binding peptides were termed “enhancer domains.” PDZ-FN3 fusions were termed “affinity clamps.” Thus, in some or any of the embodiments herein, the PDZ Domain is fused to an enhancer domain, for example, an amino acid sequence at least 80%, 85%, 90% or 95% identical to at least 50 amino acids of FN3. Such affinity clamps and enhancer domains are contemplated for use in the present invention.

[0099] In various embodiments, the PDZ Domain is a tandem PDZ domain. Lee and Zheng (Cell Comm. & Signaling, 8:8 (2010); incorporated herein by reference in its entirety) described tandem arrangements of PDZ domains 1 and 2 from the GRIP-1 protein wherein each PDZ domain required the presence of the other for proper folding. Similarly, a tandem arrangement of the 4^{th} and 5^{th} PDZ domains from GRIP-1 was required for interaction with GluR2/3. Thus, in some or any of the embodiments herein, the PDZ Domain is a tandem PDZ domain, for example PDZ1 and PDZ2 from GRIP-1 (Accession #NP083012) or PDZ4 and PDZ5 from GRIP-1. Such tandem PDZ domains may comprise at least 2, 3, 4 or more PDZ domains of the same or different sequences.

[0100] In various embodiments, the PDZ Domain is a PDZ dimer comprising two PDZ domains (of the same or different sequence), that may be noncovalently or covalently bound, that retains the ability to bind to a PDZ-binding peptide.

[0101] In various embodiments, the PDZ Domain is a PDZ-like domain. Lee and Zheng (Cell Comm. & Signaling, 8:8 (2010)) described various proteins that adopt a PDZ-like fold consisting of 5 13-strands capped by 2-helices. Proteins with PDZ-like domains include HtrA (or DegP), DegS, and DegQ. Thus, in some or any of the embodiments herein, the PDZ Domain is a PDZ-like domain, a PDZ-like domain from HtrA, DegS, or DegQ.

[0102] 2. PDZ-Binding Peptides

[0103] A PDZ-binding peptide useful according to the present invention can be of any length or sequence, although generally the portion that interacts with a PDZ domain is the C-terminal 3-4 amino acids of the PDZ-binding protein. As used herein, “PDZ-binding peptide” refers to an approximately 15- to 20-amino acid region at the C-terminus or surrounding the internal PDZ-binding region of a PDZ-binding protein; or fragments thereof that are at least 5, 6, 7, 8, 9, 10 or more amino acids in length; or variants of such fragments wherein 1, 2, 3, 4, 5, 6, 7, 8 or 9 substitutions, preferably conservative substitutions, are made to the native sequence, provided that a Cys residue is retained that permits disulfide linkage to the PDZ Domain.

[0104] In some or any embodiments herein, a PDZ-binding peptide is derived from the NorpA protein (SEQ ID NO: 1) (i.e., a NorpA PDZ-binding peptide), and is for example, derived from the 20 amino acids at the C-terminus of a NorpA protein (SEQ ID NO: 1). In some examples, the NorpA PDZ-binding peptide is a C-terminal fragment at least 4-20, or 5-15, or 5-20 amino acids in length, that may comprise one or more substitutions (e.g., 1, 2, 3, 4, 5, 6, 7, 8, or 9), preferably conservative substitutions, and that retains the Cys at the −1 position. In some or any embodiments, the peptide comprises the amino acid sequence X₁-X₂-X₃-C—X₄, where C is an invariant cysteine and X₁, X₂, X₃, and X₄ can be any residue (SEQ ID NO: 13). In alternative embodiments, these variable amino acids are as follows: X₁ is threonine, serine, or tyrosine; X₂ is glutamic acid or aspartic acid; X₃ is phenylalanine or tyrosine, and X₄ is alanine, glycine, leucine, isoleucine, or valine (SEQ ID NO: 14). In some or any embodiments, e.g., when the PDZ Domain interacting with the PDZ-binding peptide is a Type I PDZ domain, the PDZ-binding peptide comprises the consensus sequence S/T-X-V/L, where X is any residue. In some or any embodiments, e.g., when the PDZ Domain interacting with the PDZ-binding peptide is a Type II PDZ domain, the PDZ-binding peptide comprises the consensus sequence Φ-X-Φ, where Φ is a large, hydrophobic residue. A PDZ-binding peptide of the present invention can comprise any segment or fragment of a NorpA polypeptide (representative NorpA polypeptide set forth in SEQ ID NO: 1), or functional equivalent thereof as defined herein, so long as the segment, fragment, or functional equivalent thereof exhibits the functional characteristic of binding a PDZ1 domain polypeptide as defined herein. In a specific embodiment, the PDZ-binding peptide sequence is TEFCA (SEQ ID NO: 15), or a modified peptide wherein one, two, three, or four conservative substitutions are made, providing that the Cys residue is retained, preferably at position-1. In another embodiment, the PDZ-binding peptide sequence is GKTEFCA (SEQ ID NO: 16), or a modified peptide wherein one, two, three, four, five, or six conservative substitutions are made, providing that the Cys residue is retained, preferably at position −1. In another embodiment, the PDZ-binding peptide sequence is KTEFCA (SEQ ID NO: 17), or a modified peptide wherein one, two, three, four, or five conservative substitutions are made, providing that the Cys residue is retained, preferably at position −1.

[0105] As discussed above, the InaD PDZ1 domain binds the C-terminus of NorpA, which has a Cys residue at the −1 position of NorpA (i.e., the second-to-last residue of SEQ ID NO: 1). Additional examples of proteins with a naturally occurring Cys residue, e.g., at the −1 position, that are expected to interact with a cognate PDZ domain in a manner similar to the InaD-NorpA interaction include but are not limited to, the PDZ binding peptide from Drosophila Wingless (SwissProt accession No. P13217; C-terminal sequence TCL), Knirps (P10734; VCV), netrin A (Q24567; TCA); Human ZFP36 (17209; C-terminal sequence SCV), ZAP70 (P43403; ACA), Ulk-1 (O75385; ICA), adenylosuccinase (P30566; LCL), P53 induced protein 10 (O14682; FCL), NAG-2 (O14817; YCA), c-Myc (P01106; SCA), insulin-like peptide 4 (Q14641; LCT), glutathione peroxidase (P07203; SCA), 5-HT-2A (P28223; SCV), T-cadherin receptor (P55290; ACL), CD86 precursor (P42081; TCF), estradiol 17B hydrogenase (P56937; SCL), EGR-3 (Q06889; TCA), galactokinase I (P51570; LCL), and Frizzled 10 (trEMBL Q9ULW2; TCV). In some embodiments, the PDZ-binding peptide is from Rat hexokinase III (P27296; C-terminal sequence ACV), Olif. Rec. like prot I15 (P27296; FCL), Olif. Rec. like prot F3 (P23265; FCY), and D3 phosphoglycerate dehydrogenase (O08651; FCF). In any of these embodiments, the PDZ-binding peptide is a C-terminal fragment of any of the preceding proteins at least 4-20, or 5-15, or 5-20 amino acids in length, that may comprise one or more substitutions (e.g. 1, 2, 3, 4, 5, 6, 7, 8, or 9), preferably conservative substitutions, and that retains the Cys at the −1 position.

[0106] In some or any of the embodiments herein, the PDZ-binding peptide is 5 to 20 amino acids or 4 to 20 amino acids in length. In other embodiments, the PDZ-binding peptide is less than 15 amino acids in length, e.g., 3 to 15 amino acids in length. In various embodiments, the PDZ-binding peptide is 5, 6, 7, 8, 9, 10, 11, 12, 13, 14, 15, 16, 17, 18, 19, 20, 21, 22, 23, 24, 25, 26, 27, 28, 29, 30, 31, 32, 33, 34, 35, 36, 37, 38, 39, or 40 amino acids in length, or any range between any of these endpoints.

[0107] In one embodiment, the PDZ-binding peptide is fused to the C-terminus of the protein of interest, e.g., polypeptide binding agent or the antibody or antigen-binding fragment thereof.

[0108] In some or any of the embodiments herein, a PDZ domain and PDZ-binding peptide pair is selected from Table 1. Exemplary PDZ domains and their respective ligands (i.e., PDZ-binding peptides) were obtained from PDZBase (Beuming et al., Bioinformatics, 21 (6): 827-828 (2005)) and are listed in Table 1.

TABLE 1
PDZ Domain/PDZ-binding peptide pairs

| PDZ | | | | PDZ | | | | | |
|---|---|---|---|---|---|---|---|---|---|
| containing | | SEQ | | Do- | | | | | SEQ |
| protein | Accession | ID | | main | | Accession | | C-terminal Sequence | ID |
| name | No. | NO | Species | No. | Ligand Name | No. | Species | (PDZ binding peptide) | NO |
| LIN-7 | NP_496982 | 91 | C. | 1 | Let-23 | NP_495962 | C. | EEAEAVQYENEEVSQKETCL | 184 |
| | | | elegans | | | | elegans | | |
| Dsh | NP_511118 | 92 | Droso- | 1 | Vang | NP_477177 | Droso- | EVVDPKSNKFVLKLNSETSV | 185 |
| | | | phila | | | | phila | | |
| Scribble | NP_733156 | 93 | Droso- | 2 | Gukh | NP_001097834 | Droso- | NKYVAAPVANPPLPSFETAL | 186 |
| | | | phila | | | | phila | | |
| Dlg1 | NP_727519 | 94 | Droso- | 1 | Fasciclin-II | NP_525066 | Droso- | FDGRFVHSRSGEIIGKNSAV | 187 |
| | | | phila | | | | phila | | |
| Dlg1 | NP_727519 | 94 | Droso- | 2 | Fasciclin-II | NP_525066 | Droso- | FDGRFVHSRSGEIIGKNSAV | 187 |
| | | | phila | | | | phila | | |
| Dlg1 | NP_727519 | 94 | Droso- | 1 | Shaker | NP_728123 | Droso- | SSGLTMRHNNALAVSIETDV | 188 |
| | | | phila | | | | phila | | |
| Dlg1 | NP_727519 | 94 | Droso- | 2 | Shaker | NP_728123 | Droso- | SSGLTMRHNNALAVSIETDV | 188 |
| | | | phila | | | | phila | | |
| Veli-2 | NP_071448 | 95 | human | 1 | BGT-1 | NP_003035 | human | NFGPSPTREGLIAGEKETHL | 189 |
| AF-6 | NP_001193937 | 96 | human | 1 | PVRL3 | NP_056295 | human | EDDLVSHVDGSVISRREWYV | 190 |
| AF-6 | NP_001193937 | 96 | human | 1 | EPHA7 | NP_004431 | human | SSIQTMRAQMLHLHGTGIQV | 191 |
| AF-6 | NP_001193937 | 96 | human | 1 | EPHB2 | NP_004433 | human | ILNSIQVMRAQMNQIQSVEV | 192 |
| AF-6 | NP_001193937 | 96 | human | 1 | PVRL1 | NP_002846 | human | AENMVSQNDGSFISKKEWYV | 193 |
| AF-6 | NP_001193937 | 96 | human | 1 | PVRL2 | NP_001036189 | human | SSPSDSYQGKGFVMSRAMYV | 194 |
| AF-6 | NP_001193937 | 96 | human | 1 | EPHB3 | NP_004434 | human | ILSSIQDMRLQMNQTLPVQV | 195 |
| AF-6 | NP_001193937 | 96 | human | 1 | EPHB6 | NP_058642 | human | YSQPSARSEGEFKQTSSFLV | 196 |
| AIE- | NP_005700 | 97 | human | 1 | Sans | NP_775748 | human | AVRRRRQAMERPPALEDTEL | 197 |
| 75/harmonin | | | | | | | | | |
| AIE- | NP_005700 | 97 | human | 1 | Usher syndrome | NP_114147 | human | RALGKPRPPLPPPQLGDTFL | 198 |
| 75/harmonin | | | | | type-1C protein- | | | | |
| | | | | | binding protein 1 | | | | |
| MAGI-2 | NP_036433 | 98 | human | 5 | Delta-catenin | NP_001323 | human | PYSELNYETSHYPASPDSWV | 199 |
| MAGI-2 | NP_036433 | 98 | human | 5 | GluR-delta2 | NP_001501 | human | QPTPTLGLNLGNDPDRGTSI | 200 |
| MAGI-2 | NP_036433 | 98 | human | 1 | Beta1 AR | NP_000675 | human | DSDSSLDEPCRPGFASESKV | 201 |
| MAGI-2 | NP_036433 | 98 | human | 1 | Pten | NP_000305 | human | DSDPENEPFDEDQHTQITKV | 202 |
| MAGI-2 | NP_036433 | 98 | human | 2 | RAPGEF2 | NP_055062 | human | PYQSQGFSTEEDEDEQVSAV | 203 |
| CASK | NP_001119526 | 99 | human | 1 | JAM | NP_058642 | human | YSQPSARSEGEFKQTSSFLV | 196 |
| CASK | NP_001119526 | 99 | human | 1 | Caspr2 | NP_054860 | human | MNNDPNFTETIDESKKEWLI | 204 |
| CASK | NP_001119526 | 99 | human | 1 | Caspr4 | NP_207837 | human | LKSELNIQNAVNENQKEYFF | 205 |
| CASK | NP_001119526 | 99 | human | 1 | Syndecan-1 | NP_002988 | human | PKQANGGAYQKPTKQEEFYA | 206 |
| CASK | NP_001119526 | 99 | human | 1 | Syndecan-2 | NP_002989 | human | GERKPSSAAYQKAPTKEFYA | 207 |
| CASK | NP_001119526 | 99 | human | 1 | Syndecan-3 | NP_055469 | human | EPKQASVTYQKPDKQEEFYA | 208 |
| CASK | NP_001119526 | 99 | human | 1 | Syndecan-4 | NP_002990 | human | SYDLGKKPIYKKAPTNEFYA | 209 |
| Delphilin | NP_001138590 | 100 | human | 1 | GluR-delta2 | NP_001501 | human | QPTPTLGLNLGNDPDRGTSI | 200 |
| InaD-like | NP_795352 | 101 | human | 8 | Claudin-1 | NP_066924 | human | SYPTPRPYPKPAPSSGKDYV | 201 |
| protein | | | | | | | | | |
| InaD-like | NP_795352 | 101 | human | 6 | ZO-3 | NP_055243 | human | VHDAESSDEDGYDWGPATDL | 202 |
| protein | | | | | | | | | |
| ERBIN | NP_061165 | 102 | human | 1 | ARVCF | NP_001661 | human | AVRLVDAVGDAKPQPVDSWV | 203 |
| ERBIN | NP_061165 | 102 | human | 1 | delta-catenin | NP_001323 | human | PYSELNYETSHYPASPDSWV | 199 |
| ERBIN | NP_061165 | 102 | human | 1 | PKP4 | NP_001005476 | human | STKRPSYRAEQYPGSPDSWV | 204 |
| GIPC | NP_974223 | 103 | human | 1 | 5T4 | NP_006661 | human | YRYEINADPRLTNLSSNSDV | 205 |
| GIPC | NP_974223 | 103 | human | 1 | Alpha-actinin-1 | NP_001123476 | human | VPGALDYMSFSTALYGESDL | 206 |
| GIPC | NP_974223 | 103 | human | 1 | Beta1-AR | NP_000675 | human | DSDSSLDEPCRPGFASESKV | 201 |
| GIPC | NP_974223 | 103 | human | 1 | TRP-1 | NP_000541 | human | QYQCYAEEYEKLQNPNQSVV | 207 |
| GIPC | NP_974223 | 103 | human | 1 | Integrin-alpha5 | NP_002196 | human | LPYGTAMEKAQLKPPATSDA | 208 |
| GIPC | NP_974223 | 103 | human | 1 | Integrin-alpha6A | NP_001073286 | human | IDNLEKKQWITKWNRNESYS | 209 |
| GOPC/PIST | NP_065132 | 104 | human | 1 | CFTR | NP_776297 | human | TDEEREETEEEVYLLNSTTL | 210 |
| IKEPP | NP_001161940 | 105 | human | 3 | GCC | NP_004954 | human | KKGTLEYLQLNTTDKESTYF | 211 |
| PTPL1 | NP_542414 | 106 | human | 4 | PARG1 | NP_004806 | human | PRLKRMQQFEDLEDEIPQFV | 212 |
| PTPL1 | NP542414 | 106 | human | 3 | PRK2 | NP_006247 | human | ILSEEEQEMFRDFDYIADWC | 213 |
| PTPL1 | NP_542414 | 106 | human | 2 | TRIP6 | NP_003293 | human | CKACSAWRIQELSATVTTDC | 214 |
| PTPL1 | NP_542414 | 106 | human | 5 | Ephrin-B1 | NP_004420 | human | PVYIVQEMPPQSPANIYYKV | 215 |
| PTPL1 | NP_542414 | 106 | human | 2 | FASLR | NP_690610 | human | KDITSDSENSNFRNEIQSLV | 216 |
| PTPL1 | NP542414 | 106 | human | 4 | FASLR | NP690610 | human | KDITSDSENSNFRNEIQSLV | 216 |
| PTPL1 | NP_542414 | 106 | human | 3 | p75 | NP_002498 | human | IQRADLVESLCSESTATSPV | 217 |
| PTPase- | NP_002821 | 107 | human | 1 | GluR-delta2 | NP_001501 | human | QPTPTLGLNLGNDPDRGTSI | 200 |
| MEG1 | | | | | | | | | |
| PTPase- | NP_002821 | 107 | human | 1 | NMDAR2A | NP_000824 | human | LNSCSNRRVYKKMPSIESDV | 218 |
| MEG1 | | | | | | | | | |
| MP55 | NP_071919 | 108 | human | 1 | CRB1 | NP_957705 | human | EGSRVEMWNLMPPPAMERLI | 219 |
| Shank1 | NP_057232 | 109 | human | 1 | DAP-1 | NP_004737 | human | SATESAESIEIYIPEAQTRL | 220 |
| Shank1 | NP_057232 | 109 | human | 1 | DAP12 | NP_004736 | human | SASERADSIEIYIPEAQTRL | 221 |
| Shank2 | NP_036441 | 110 | human | 1 | DAP-1 | NP_004737 | human | SATESAESIETYIPEAQTRL | 220 |
| Shank2 | NP_036441 | 110 | human | 1 | DAP-2 | NP_004736 | human | SASERADSIEIYIPEAQTRL | 221 |
| TIP-1 | NP_004243 | 111 | human | 1 | L-glutaminase | NP_037399 | human | ETQAEAAAEALSKENLESMV | 205 |
| TIP-1 | NP_004243 | 111 | human | 1 | Rhotekin | NP_149035 | human | PRTRGFCSKGQLRTWLQSPV | 206 |
| Veli-1 | NP_004655 | 112 | human | 1 | BGT-1 | NP_003035 | human | NFGPSPTREGLIAGEKETHL | 189 |
| Veli-2 | NP_071448 | 95 | human | 1 | Kir2.3 | NP_004972 | human | ERMQASLPLDNISYRRESAI | 222 |
| Veli-3 | NP_060832 | 113 | human | 1 | NR2B | NP_000825 | human | FNGSSNGHVYEKLSSIESDV | 223 |
| Veli-3 | NP_060832 | 113 | human | 1 | BGT-1 | NP_003035 | human | NFGPSPTREGLIAGEKETHL | 189 |
| ZO-1 | NP_003248 | 114 | human | 2 | Connexin-43 | NP_000156 | human | PSSRASSRASSRPRPDDLEI | 224 |
| ZO-1 | NP_003248 | 114 | human | 2 | Connexin-45 | NP_005488 | human | GSNKSTASSKSGDGKNSVWI | 115 |
| SAP102 | NP_005488 | 115 | human | 1 | PMCA4b | NP_001675 | human | CNQVQLPQSDSSLQSLETSV | 210 |
| SAP102 | NP_005488 | 115 | human | 2 | PMCA4b | NP_001675 | human | CNQVQLPQSDSSLQSLETSV | 210 |
| SAP102 | NP_005488 | 115 | human | 1 | p51-nedasin | NP_004284 | human | RNIEEVYVGGKQVVPFSSSV | 225 |
| SAP97 | NP_001191316 | 116 | human | 1 | PMCA2b | NP_001674 | human | SKSATSSSPGSPIHSLETSL | 216 |
| SAP97 | NP_001191316 | 116 | human | 2 | PMCA2b | NP_001674 | human | SKSATSSSPGSPIHSLETSL | 216 |
| SAP97 | NP_001191316 | 116 | human | 1 | PMCA4b | NP_001675 | human | CNQVQLPQSDSSLQSLETSV | 210 |
| SAP97 | NP_001191316 | 116 | human | 2 | PMCA4b | NP_001675 | human | CNQVQLPQSDSSLQSLETSV | 210 |
| SAP97 | NP_001191316 | 116 | human | 2 | PBK | NP_060962 | human | EDPKDRPSAAHIVEALETDV | 226 |
| MUPP1 | NP_003820 | 117 | human | 10 | 5HT-2C | NP_000859 | human | ENLELPVNPSSVVSERISSV | 227 |
| MUPP1 | NP_003820 | 117 | human | 10 | TAPP-1 | NP_067635 | human | QEKDCDLVDLDDASLPVSDV | 228 |
| MUPP1 | NP_003820 | 117 | human | 13 | TAPP-1 | NP_067635 | human | QEKDCDLVDLDDASLPVSDV | 228 |
| MUPP1 | NP_003820 | 117 | human | 10 | TAPP-2 | NP_067636 | human | LKEKAFPFDLDDDSIRTSDV | 229 |
| MUPP1 | NP_003820 | 117 | human | 13 | TAPP-2 | NP_067636 | human | LKEKAFPFDLDDDSIRTSDV | 229 |
| MUPP1 | NP_003820 | 117 | human | 10 | KIT | NP_000213 | human | INSVGSTASSSQPLLVHDDV | 230 |
| NHERF-1 | NP_004243 | 111 | human | 1 | CFTR | NP_000483 | human | KPQIAALKEETEEEVQDTRL | 231 |
| NHERF-1 | NP_004243 | 111 | human | 1 | EPI64 | NP_001191169 | human | SAHHRSQESLTSQESEDTYL | 232 |
| NHERF-1 | NP_004243 | 111 | human | 2 | GRK6 | NP_001004106 | human | SRQDCCGNCSDSEEELPTRL | 233 |
| NHERF-1 | NP_004243 | 111 | human | 1 | P2Y1 | NP_002554 | human | SEDMTLNILPEFKQNGDTSL | 234 |
| NHERF-1 | NP_004243 | 111 | human | 1 | PAG | NP_060910 | human | KENDYESISDLQQGRDITRL | 235 |
| NHERF-1 | NP_004243 | 111 | human | 2 | YAP65 | NP_001123617 | human | DMESVLAATKLDKESFLTWL | 236 |
| NHERF-1 | NP_004243 | 111 | human | 1 | Beta2-AR | NP_000015 | human | VPSDNIDSQGRNCSTNDSLL | 237 |
| NHERF-1 | NP_004243 | 111 | human | 1 | DRA | NP_000102 | human | INTNGGLRNRVYEVPVETKF | 238 |
| NHERF-1 | NP_004243 | 111 | human | 1 | KOR-1 | NP_000903 | human | RNTVQDPAYLRDIDGMNKPV | 239 |
| NHERF-2 | NP_004243 | 111 | human | 2 | Clcn3c | NP_776297 | human | TDEEREETEEEVYLLNSTTL | 210 |
| NHERF-2 | NP_004243 | 111 | human | 1 | EPI64 | NP_001191169 | human | SAHHRSQESLTSQESEDTYL | 232 |
| NHERF-2 | NP_004243 | 111 | human | 2 | PLC-beta3 | NP_001171812 | human | GSSGHLSGADSESQEENTQL | 240 |
| NHERF-2 | NP_004243 | 111 | human | 1 | Sgk1 | NP_005618 | human | KEAAEAFLGFSYAPPTDSFL | 241 |
| NHERF-2 | NP_004243 | 111 | human | 1 | beta2-AR | NP_000015 | human | VPSDNIDSQGRNCSTNDSLL | 237 |
| NHERF-2 | NP_004243 | 111 | human | 1 | SRY | NP_003131 | human | PINAASSPQQRDRYSHWTKL | 242 |
| NHERF-2 | NP_004243 | 111 | human | 2 | SRY | NP_003131 | human | PINAASSPQQRDRYSHWTKL | 242 |
| PDZ- | NP_056128 | 118 | human | 1 | IGF-1R | NP_000866 | human | HMNGGRKNERALPLPQSSTC | 243 |
| RhoGEF | | | | | | | | | |
| PDZ- | NP_056128 | 118 | human | 1 | PlexinB1 | NP_002664 | human | QLGYRLQQIAAAVENKVTDL | 244 |
| RhoGEF | | | | | | | | | |
| PDZ- | NP_056128 | 118 | human | 1 | PlexinB2 | NP_036533 | human | QLAFRLQQIAAALENKVTDL | 245 |
| RhoGEF | | | | | | | | | |
| PDZ- | NP_056128 | 118 | human | 1 | PlexinB3 | NP_001156729 | human | QLACRLQQVAALVENKVTDL | 246 |
| RhoGEF | | | | | | | | | |
| PDZK1 | NP_001188255 | 119 | human | 1 | Clcn3c | NP_776297 | human | TDEEREETEEEVYLLNSTTL | 210 |
| PICK1 | NP_036539 | 120 | human | 1 | ARF1 | NP_001649 | human | SGDGLYEGLDWLSNQLRNQK | 247 |
| PICK1 | NP_036539 | 120 | human | 1 | ARF3 | NP_001650 | human | SGDGLYEGLDWLANQLKNKK | 248 |
| PICK1 | NP_036539 | 120 | human | 1 | DAT | NP_001035 | human | RELVDRGEVRQFTLRHWLKV | 249 |
| PICK1 | NP_036539 | 120 | human | 1 | ERBB2 | NP_004439 | human | TFKGTPTAENPEYLGLDVPV | 250 |
| PICK1 | NP_036539 | 120 | human | 1 | NET | NP_001034 | human | HHLVAQRDIRQFQLQHWLAI | 251 |
| PSD-93 | NP_001193698 | 121 | human | 1 | PMCA2b | NP_001674 | human | SKSATSSSPGSPIHSLETSL | 216 |
| PSD-93 | NP_001193698 | 121 | human | 2 | PMCA2b | NP_001674 | human | SKSATSSSPGSPIHSLETSL | 216 |
| PSD-93 | NP_001193698 | 121 | human | 1 | PMCA4b | NP_001675 | human | CNQVQLPQSDSSLQSLETSV | 210 |
| PSD-93 | NP_001193698 | 121 | human | 2 | PMCA4b | NP_001675 | human | CNQVQLPQSDSSLQSLETSV | 210 |
| PSD-95 | NP_001356 | 122 | human | 1 | PMCA2b | NP_001674 | human | SKSATSSSPGSPIHSLETSL | 216 |
| PSD-95 | NP_001356 | 122 | human | 2 | PMCA2b | NP_001674 | human | SKSATSSSPGSPIHSLETSL | 216 |
| PSD-95 | NP_001356 | 122 | human | 1 | PMCA4b | NP_001675 | human | CNQVQLPQSDSSLQSLETSV | 210 |
| PSD-95 | NP_001356 | 122 | human | 2 | PMCA4b | NP_001675 | human | CNQVQLPQSDSSLQSLETSV | 210 |
| alpha-1- | NP_003089 | 123 | human | 1 | SAPK3 | NP_000325 | human | WPPAPPPGQTVRPGVKESLV | 252 |
| syntrophin | | | | | | | | | |
| alpha-1- | NP_003089 | 123 | human | 1 | SKM1 | NP_001153633 | human | HSEDLADFPPSPDRDRESIV | 253 |
| syntrophin | | | | | | | | | |
| alpha-1- | NP_003089 | 123 | human | 1 | L-glutaminase | NP_037399 | human | ETQAEAAAEALSKENLESMV | 205 |
| syntrophin | | | | | | | | | |
| beta-2- | NP_006741 | 124 | human | 1 | ABCA1 | NP_005493 | human | VDVAVLTSFLQDEKVKESYV | 254 |
| syntrophin | | | | | | | | | |
| beta-2- | NP_006741 | 124 | human | 1 | ERBB4 | NP_001036064 | human | SLKPGTVLPPPPYRHRNTVV | 255 |
| syntrophin | | | | | | | | | |
| gamma-1- | NP_061840 | 125 | human | 1 | DGKZ | NP_001099010 | human | YLENRQHYQMIQREDQETAV | 256 |
| syntrophin | | | | | | | | | |
| gamma-2- | NP_061841 | 126 | human | 1 | SKM2 | NP_001153633 | human | HSEDLADFPPSPDRDRESIV | 253 |
| syntrophin | | | | | | | | | |
| p55 | NP_001159933 | 127 | human | 1 | Glycophorin-C | NP_058131 | human | LQGDPALQDAGDSSRKEYFI | 257 |
| PTP-H1 | NP_001138843 | 128 | human | 1 | ADAM17 | NP_003174 | human | KAASFKLQRQNRVDSKETEC | 258 |
| MAGI-2 | NP_036433 | 98 | human | 1 | HPV-16-E6 | NP_040310 | Papillo- | HSCCNRARQERLQRRRETQV | 259 |
| | | | | | | | mavirus | | |
| MAGI-3 | NP_001136254 | 129 | human | 1 | HPV-16-E6 | NP_040310 | Papillo- | HSCCNRARQERLQRRRETQV | 259 |
| | | | | | | | mavirus | | |
| alpha-1- | NP_003089 | 123 | mouse | 1 | aquaporin-4 | NP_001641 | mouse | IDRGEEKKGRDSSGEVLSSV | 260 |
| syntrophin | | | | | | | | | |
| ASIP/PAR3 | NP_001013599 | 130 | mouse | 1 | PVRL1 | NP_067399 | mouse | AENMVSQNDGSFISKKEWYV | 261 |
| ASIP/PAR3 | NP_001013599 | 130 | mouse | 1 | PVRL3 | NP_067470 | mouse | EDGLVSHVDGSVISRREWYV | 262 |
| ASIP/PAR3 | NP_001013599 | 130 | mouse | 1 | JAM | NP_766235 | mouse | YSQPSARSEGEFKQTSSFLV | 263 |
| Cipp | NP_031730 | 131 | mouse | 4 | DRASIC | NP_892045 | mouse | CAVTKTLSASHRTCYLVTRL | 264 |
| Cipp | NP_031730 | 131 | mouse | 2 | NR2B | NP_032197 | mouse | FNGSSNGHVYEKLSSIESDV | 265 |
| Cipp | NP_031730 | 131 | mouse | 3 | NR2B | NP_032197 | mouse | FNGSSNGHVYEKLSSIESDV | 265 |
| Cipp | NP_031730 | 131 | mouse | 3 | NR2C | NP_034480 | mouse | TQGFPRSCTWRRISSLESEV | 266 |
| Cipp | NP_031730 | 131 | mouse | 2 | Kir4.1 | NP_001034573 | mouse | SLREQAEKEGSALSVRISNV | 267 |
| Cipp | NP_031730 | 131 | mouse | 2 | Kir4.2 | NP_062638 | mouse | RQEDQRERELRSLLLQQSNV | 268 |
| Cipp | NP_031730 | 131 | mouse | 3 | kir4.2 | NP_062638 | mouse | RQEDQRERELRSLLLQQSNV | 268 |
| Cypher1c | NP_001034164 | 132 | mouse | 1 | alpha-actinin-2 | NP_150371 | mouse | VPGALDYTAFSSALYGESDL | 269 |
| DVL-1 | NP_034221 | 133 | mouse | 1 | Vang | NP_277044 | mouse | EFVDPKSHKFVMRLQSETSV | 270 |
| Enigma | NP_001177782 | 134 | mouse | 1 | beta-tropomyosin | NP_033442 | mouse | MKYKAISEELDNALNDITSL | 271 |
| ERBIN | NP_001005868 | 135 | mouse | 1 | ERBB2 | NP_001003817 | mouse | TFEGTPTAENPEYLGLDVPV | 272 |
| GIPC | NP_061241 | 136 | mouse | 1 | Glut1 | NP_035530 | mouse | SQSDKTPEELFHPLGADSQV | 273 |
| GIPC | NP_061241 | 136 | mouse | 1 | KIF1B | NP_032467 | mouse | PRMRRQFSAPNLKAGRETTV | 274 |
| GIPC | NP_061241 | 136 | mouse | 1 | Semaphorin-4C | NP_001119519 | mouse | RRKLQQRQPLPDSNPEESSV | 275 |
| GIPC | NP_061241 | 136 | mouse | 1 | TGFR-3 | NP_035708 | mouse | SAAHSIGSTQSTPCSSSSTA | 276 |
| GOPC/PIST | NP_001186201 | 137 | mouse | 1 | Frizzled-1 | NP_067432 | mouse | NSWRKFYTRLTNSKQGETTV | 277 |
| MAGI-1 | NP_034497 | 138 | mouse | 5 | beta-catenin | NP_031640 | mouse | LMDGLPPGDSNQLAWFDTDL | 278 |
| MAGI-1 | NP_034497 | 138 | mouse | 1 | NET1 | NP_001040624 | mouse | GLRRARDKAQSGGKKKETLV | 279 |
| Veli-1 | NP_001028395 | 139 | mouse | 1 | NR2B | NP_032197 | mouse | FNGSSNGHVYEKLSSIESDV | 265 |
| Veli-2 | NP_035828 | 140 | mouse | 1 | NR2B | NP_032197 | mouse | FNGSSNGHVYEKLSSIESDV | 265 |
| ZO-1 | NP_033412 | 141 | mouse | 1 | Claudin-1 | NP_057883 | mouse | SYPTPRPYPKPTPSSGKDYV | 280 |
| ZO-2 | NP_001185914 | 142 | mouse | 1 | Claudin-1 | NP_057883 | mouse | SYPTPRPYPKPTPSSGKDYV | 280 |
| SAP102 | NP_058027 | 143 | mouse | 1 | BAI1 | NP_778156 | mouse | KAGATIPLVGQDIIDLQTEV | 281 |
| SAP102 | NP_058027 | 143 | mouse | 2 | BAI1 | NP_778156 | mouse | KAGATIPLVGQDIIDLQTEV | 281 |
| MUPP1 | NP_034950 | 144 | mouse | 9 | JAM | NP_766235 | mouse | YSQPSTRSEGEFKQTSSFLV | 263 |
| MUPP1 | NP_034950 | 144 | mouse | 10 | Claudin-1 | NP_057883 | mouse | SYPTPRPYPKPTPSSGKDYV | 280 |
| NHERF-1 | NP_036160 | 145 | mouse | 1 | PLC-beta1 | NP_001139302 | mouse | PPSSEELEGENPGKEFDTPL | 282 |
| NHERF-1 | NP_036160 | 145 | mouse | 1 | TrpC4 | NP_058680 | mouse | DYDLSPTDTAAHEDYVTTRL | 283 |
| NHERF-1 | NP_036160 | 145 | mouse | 1 | TrpC5 | NP_033454 | mouse | CDLLMHKWGDGQEEQVTTRL | 284 |
| NHERF-1 | NP_036160 | 145 | mouse | 1 | NaPi-7 | NP_035522 | mouse | PPATPSPRLALPAHHNATRL | 285 |
| NHERF-2 | NP_075542 | 146 | mouse | 1 | Taz | NP_598545 | mouse | PLFNDVESVLNKSEPELTWL | 286 |
| NHERF-2 | NP_075542 | 146 | mouse | 1 | NaPi-7 | NP_035522 | mouse | PPATPSPRLALPAHHNATRL | 285 |
| IL-16 | NP_034681 | 147 | mouse | 1 | MBC | NP_001153006 | mouse | LGRGRSEEALADSRSYVSNL | 287 |
| PDZ-RGS3 | NP_599018 | 148 | mouse | 1 | Ephrin-B1 | NP_034240 | mouse | PVYIVQEMPPQSPANIYYKV | 288 |
| PDZK1 | NP_067492 | 149 | mouse | 1 | CFTR | NP_066388 | mouse | RTQITALKEETEEEVQETRL | 289 |
| PDZK1 | NP_067492 | 149 | mouse | 3 | CFTR | NP_066388 | mouse | RTQITALKEETEEEVQETRL | 289 |
| PDZK1 | NP_067492 | 149 | mouse | 4 | CFTR | NP_066388 | mouse | RTQITALKEETEEEVQETRL | 289 |
| PDZK1 | NP_067492 | 149 | mouse | 3 | NaPi-7 | NP_035522 | mouse | PPATPSPRLALPAHHNATRL | 285 |
| PICK1 | NP_032863 | 150 | mouse | 1 | PKC-A | NP_035231 | mouse | FEGFSYVNPQFVHPILQSAV | 290 |
| PSD-93 | NP_035937 | 151 | mouse | 1 | Frizzled-1 | NP_067432 | mouse | NSWRKFYTRLTNSKQGETTV | 277 |
| PSD-93 | NP_035937 | 151 | mouse | 2 | Frizzled-1 | NP_067432 | mouse | NSWRKFYTRLTNSKQGETTV | 277 |
| PSD-93 | NP_035937 | 151 | mouse | 1 | Frizzled-4 | NP_032081 | mouse | KREKRGNGWVKPGKGNETVV | 291 |
| PSD-93 | NP_035937 | 151 | mouse | 2 | Frizzled-4 | NP_032081 | mouse | KREKRGNGWVKPGKGNETVV | 291 |
| PSD-93 | NP_035937 | 151 | mouse | 1 | Frizzled-7 | NP_032083 | mouse | QSWRRFYHRLSHSSKGETAV | 292 |
| PSD-95 | NP_001103222 | 152 | mouse | 1 | Frizzled-1 | NP_067432 | mouse | NSWRKFYTRLTNSKQGETTV | 277 |
| PSD-95 | NP_001103222 | 152 | mouse | 2 | Frizzled-1 | NP_067432 | mouse | NSWRKFYTRLTNSKQGETTV | 277 |
| PSD-95 | NP_001103222 | 152 | mouse | 1 | Frizzled-2 | NP_065256 | mouse | HSWRKFYTRLTNSRHGETTV | 293 |
| PSD-95 | NP_001103222 | 152 | mouse | 2 | Frizzled-2 | NP_065256 | mouse | HSWRKFYTRLTNSRHGETTV | 293 |
| PSD-95 | NP_001103222 | 152 | mouse | 1 | Frizzled-4 | NP_032081 | mouse | KREKRGNGWVKPGKGNETVV | 291 |
| PSD-95 | NP_001103222 | 152 | mouse | 2 | Frizzled-4 | NP_032081 | mouse | KREKRGNGWVKPGKGNETVV | 291 |
| ZO-3 | NP_038797 | 153 | mouse | 1 | Claudin-1 | NP_057883 | mouse | SYPTPRPYPKPTPSSGKDYV | 280 |
| Inx1 | NP_001153049 | 154 | mouse | 2 | CAR-1 | NP_034118 | mouse | PTLAPAKFKYAYKTDGITVV | 294 |
| Inx1 | NP_001153049 | 154 | mouse | 2 | CAR-2 | NP_001020363 | mouse | SRMGAVPVMIPAQSKDGSIV | 295 |
| nNos | NP_032738 | 155 | mouse | 1 | CtBP1 | NP_001185790 | mouse | PSPGQTVKPEADRDHTSDQL | 296 |
| Rhophilin1 | NP_001156937 | 156 | mouse | 1 | Ropporin | NP_109669 | mouse | GPDGLIKVNDFTQNPRVRLE | 297 |
| NHERF-2 | NP_001075576 | 157 | rabbit | 1 | Podocalyxin | NP_001076235 | rabbit | IVPLDNLTKDDLDEEEDTHL | 298 |
| MAGI-2 | NP_036433 | 98 | rat | 1 | neuroligin-1 | NP_446320 | rat | QNNTLPHPHPHPHSHSTTRV | 299 |
| Glutamate | NP_612544 | 158 | rat | 3 | glutamate | NP_001077280 | rat | QNFATYKEGYNVYGIESVKI | 300 |
| receptor- | | | | | receptor 2 | | | | |
| interacting | | | | | | | | | |
| protein 2 | | | | | | | | | |
| Glutamate | NP_612544 | 158 | rat | 5 | glutamate | NP_116785 | rat | QNYATYREGYNVYGTESVKI | 301 |
| receptor- | | | | | receptor 3 | | | | |
| interacting | | | | | | | | | |
| protein 2 | | | | | | | | | |
| MAGI-2 | NP_446073 | 159 | rat | 5 | NMDAR2C | NP_113759 | rat | IVTVVTMVTNVDFPPKESSL | 302 |
| CASK | NP_071520 | 160 | rat | 1 | Neurexin-1-alpha | NP_068535 | rat | PSSAKSANKNKKNKDKEYYV | 303 |
| CASK | NP_071520 | 160 | rat | 1 | Neurexin-beta | NP_068535 | rat | PSSAKSANKNKKNKDKEYYV | 303 |
| CASK | NP_071520 | 160 | rat | 1 | Parkin | NP_064478 | rat | CWNCGCEWNRACMGDHWFDV | 304 |
| Densin-180 | NP_476483 | 161 | rat | 1 | Maguin-1 | NP_001106837 | rat | EVDVITSSLTHTHSYIETHV | 305 |
| Densin-180 | NP_476483 | 161 | rat | 1 | delta-catenin | XP_001065606 | rat | PYSELNYETSHYPASPDSWV | 306 |
| GIPC | NP_445793 | 162 | rat | 1 | RGS-GAIP | NP_067693 | rat | LTSPTYRSLLLQGAPQSSEA | 307 |
| GIPC | NP_445793 | 162 | rat | 1 | Neuropilin-1 | NP_659566 | rat | VDGVKLKKDKLNPQSNYSEA | 308 |
| GIPC | NP_445793 | 162 | rat | 1 | Syndecan-1 | NP_037158 | rat | PKQANGGAYQKPTKQEEFYA | 309 |
| GRIP | NP_114458 | 163 | rat | 6 | Liprin-alpha-2 | NP_001102215 | rat | DVASSRLQRLDNSTVRTYSC | 310 |
| RGS12 | NP_062212 | 164 | rat | 1 | IL-8R | NP_058879 | rat | AKEGRPSFVGSSSANTSTTL | 311 |
| Shank1 | NP_113939 | 165 | rat | 1 | SS2R | NP_062221 | rat | LNETTETQRTLLNGDLQTSI | 312 |
| Shank1 | NP_113939 | 165 | rat | 1 | Beta-Pix | NP_001106994 | rat | KLVRKVLKNMNDPAWDETNL | 313 |
| Shank2 | NP_958738 | 166 | rat | 1 | CIRL-1 | NP_075251 | rat | PSLEGPGPDGDGQMQLVTSL | 314 |
| Shank2 | NP_958738 | 166 | rat | 1 | CIRL-2 | NP_599235 | rat | EGCIPEGDVREGQMQLVTSL | 315 |
| Shank3 | NP_067708 | 167 | rat | 1 | mGluR5 | NP_058708 | rat | SSPKYDTLIIRDYTQSSSSL | 316 |
| Shank3 | NP_067708 | 167 | rat | 1 | DAP-1 | NP_075235 | rat | SATESAESIEIYIPEAQTRL | 317 |
| Shank3 | NP_067708 | 167 | rat | 1 | DAP-2 | NP_446353 | rat | SATERADSIEIYIPEAQTRL | 318 |
| Shank3 | NP_067708 | 167 | rat | 1 | mGluR1a | NP_058707 | rat | PGGRQAPKGQHVWQRLSVHV | 319 |
| Tamalin | NP_620249 | 168 | rat | 1 | GABAB2 | NP_113990 | rat | TASPRHRHVPPSFRVMVSGL | 320 |
| Tamalin | NP_620249 | 168 | rat | 1 | DAP1 | NP_075235 | rat | SATESAESIEIYIPEAQTRL | 317 |
| Tamalin | NP_620249 | 168 | rat | 1 | DAP3 | NP_775168 | rat | SATESADSIEIYIPEAQTRL | 321 |
| Tamalin | NP_620249 | 168 | rat | 1 | mGluR1a | NP_058707 | rat | PNVTYASVILRDYKQSSSTL | 319 |
| Tamalin | NP_620249 | 168 | rat | 1 | mGluR5 | NP_058708 | rat | SSPKYDTLIIRDYTQSSSSL | 316 |
| RIM1 | NP_439894 | 169 | rat | 1 | ERC-2 | NP_740768 | rat | SQHSNHRPSPDQDDEEGIWA | 322 |
| RIM1 | NP_439894 | 169 | rat | 1 | ERC-1b | NP_740769 | rat | SNQTNHKPSPDQDEEEGIWA | 323 |
| SAP102 | NP_113827 | 170 | rat | 1 | ERBB4 | NP_067719 | rat | SLKPGTMLPPPPYRHRNTVV | 324 |
| SAP102 | NP_113827 | 170 | rat | 2 | ERBB4 | NP_067719 | rat | SLKPGTMLPPPPYRHRNTVV | 324 |
| SAP102 | NP_113827 | 170 | rat | 1 | NMDAR2A | NP_036705 | rat | LNSCSNRRVYKKMPSIESDV | 325 |
| SAP102 | NP_113827 | 170 | rat | 2 | NMDAR2A | NP_036705 | rat | LNSCSNRRVYKKMPSIESDV | 325 |
| SAP102 | NP_113827 | 170 | rat | 3 | NMDAR2A | NP_036705 | rat | LNSCSNRRVYKKMPSIESDV | 325 |
| SAP102 | NP_113827 | 170 | rat | 1 | NMDAR2B | NP_036706 | rat | FNGSSNGHVYEKLSSIESDV | 326 |
| SAP102 | NP_113827 | 170 | rat | 2 | NMDAR2B | NP_036706 | rat | FNGSSNGHVYEKLSSIESDV | 326 |
| SAP102 | NP_113827 | 170 | rat | 1 | PKC-A | NP_001099183 | rat | FEGFSYVNPQFVHPILQSAV | 327 |
| SAP102 | NP_113827 | 170 | rat | 2 | PKC-A | NP_001099183 | rat | FEGFSYVNPQFVHPILQSAV | 327 |
| SAP102 | NP_113827 | 170 | rat | 3 | SynGAP | NP_851606 | rat | KRLLDAQRGSFPPWVQQTKV | 328 |
| SAP97 | NP_036920 | 171 | rat | 1 | Frizzled-1 | NP_067089 | rat | NSWRKFYTRLTNSKQGETTV | 329 |
| SAP97 | NP_036920 | 171 | rat | 2 | Frizzled-1 | NP_067089 | rat | NSWRKFYTRLTNSKQGETTV | 329 |
| SAP97 | NP_036920 | 171 | rat | 1 | Frizzled-4 | NP_072145 | rat | KREKRGNGWVKPGKGNETVV | 330 |
| SAP97 | NP_036920 | 171 | rat | 2 | Frizzled-4 | NP_072145 | rat | KREKRGNGWVKPGKGNETVV | 330 |
| SAP97 | NP_036920 | 171 | rat | 1 | NMDAR2A | NP_036705 | rat | LNSCSNRRVYKKMPSIESDV | 325 |
| SAP97 | NP_036920 | 171 | rat | 1 | NMDAR2B | NP_036706 | rat | FNGSSNGHVYEKLSSIESDV | 326 |
| SAP97 | NP_036920 | 171 | rat | 3 | ADAM17 | NP_064702 | rat | KAASFKLQRQSRVDSKETEC | 331 |
| SAP97 | NP_036920 | 171 | rat | 2 | Kir2.2 | NP_446433 | rat | DRLQASSGALERPYRRESEI | 332 |
| MUPP1 | NP_062069 | 172 | rat | 1 | AN2/NG2 | NP_112284 | rat | ELLQFCRTPNPALRNGQYWV | 333 |
| Neurabin-1 | NP_445925 | 173 | rat | 1 | p70/S6K | NP_114191 | rat | YKKQAFPMISKRPEHLRMNL | 334 |
| Omp25 | NP_072121 | 174 | rat | 1 | Synaptojanin-2 | NP_072121 | rat | FVRTVAAQRLTPVDASGSSV | 174 |
| PICK1 | NP_445912 | 175 | rat | 1 | BNaC1 | NP_037024 | rat | SHTVNVPLQTALGTLEEIAC | 335 |
| PICK1 | NP_445912 | 175 | rat | 1 | BNaC2 | NP_077068 | rat | YAANILPHHPARGTFEDFTC | 336 |
| PICK1 | NP_445912 | 175 | rat | 1 | GluR2 | NP_058957 | rat | QNFATYKEGYNVYGIESVKI | 337 |
| PICK1 | NP_445912 | 175 | rat | 1 | GluR3 | NP_116785 | rat | QNYATYREGYNVYGTESVKI | 301 |
| PICK1 | NP_445912 | 175 | rat | 1 | GluR4 | NP_116785 | rat | HNLATYREGYNVYGTESIKI | 301 |
| PICK1 | NP_445912 | 175 | rat | 1 | PrRPR | NP_631932 | rat | LSWPRKIVPHGQNMTVSVVI | 338 |
| PICK1 | NP_445912 | 175 | rat | 1 | mGluR3 | NP_001099182 | rat | TYVPTVCNGREVLDSTTSSL | 339 |
| PICK1 | NP_445912 | 175 | rat | 1 | mGluR7a | NP_112302 | rat | VDPNSPAAKKKYVSYNNLVI | 340 |
| PSD-93 | NP_071618 | 176 | rat | 1 | ERBB4 | NP_067719 | rat | SLKPGTMLPPPPYRHRNTVV | 324 |
| PSD-93 | NP_071618 | 176 | rat | 2 | ERBB4 | NP_067719 | rat | SLKPGTMLPPPPYRHRNTVV | 324 |
| PSD-93 | NP_071618 | 176 | rat | 2 | GluR-delta2 | NP_077355 | rat | QPTPTLGLNLGNDPDRGTSI | 341 |
| PSD-93 | NP_071618 | 176 | rat | 1 | NMDAR2A | NP_036705 | rat | LNSCSNRRVYKKMPSIESDV | 325 |
| PSD-93 | NP_071618 | 176 | rat | 2 | NMDAR2A | NP_036705 | rat | LNSCSNRRVYKKMPSIESDV | 325 |
| PSD-93 | NP_071618 | 176 | rat | 1 | NMDAR2B | NP_036706 | rat | FNGSSNGHVYEKLSSIESDV | 326 |
| PSD-93 | NP_071618 | 176 | rat | 2 | NMDAR2B | NP_036706 | rat | FNGSSNGHVYEKLSSIESDV | 326 |
| PSD-93 | NP_071618 | 176 | rat | 1 | Kv1.4 | NP_037103 | rat | DDSETDKNNCSNAKAVETDV | 342 |
| PSD-93 | NP_071618 | 176 | rat | 2 | Kv1.4 | NP_037103 | rat | DDSETDKNNCSNAKAVETDV | 342 |
| PSD-95 | NP_062567 | 177 | rat | 1 | CRIPT | NP_063972 | rat | ICAMCGKKVLDTKNYKQTSV | 343 |
| PSD-95 | NP_062567 | 177 | rat | 1 | ERBB4 | NP_067719 | rat | SLKPGTMLPPPPYRHRNTVV | 324 |
| PSD-95 | NP_062567 | 177 | rat | 2 | ERBB4 | NP_067719 | rat | SLKPGTMLPPPPYRHRNTVV | 324 |
| PSD-95 | NP_062567 | 177 | rat | 1 | GluR6 | NP_062182 | rat | EVINMHTFNDRRLPGKETMA | 344 |
| PSD-95 | NP_062567 | 177 | rat | 1 | NMDAR2A | NP_036705 | rat | LNSCSNRRVYKKMPSIESDV | 325 |
| PSD-95 | NP_062567 | 177 | rat | 2 | NMDAR2A | NP_036705 | rat | LNSCSNRRVYKKMPSIESDV | 325 |
| PSD-95 | NP_062567 | 177 | rat | 1 | NMDAR2B | NP_036706 | rat | FNGSSNGHVYEKLSSIESDV | 326 |
| PSD-95 | NP_062567 | 177 | rat | 2 | NMDAR2B | NP_036706 | rat | FNGSSNGHVYEKLSSIESDV | 326 |
| PSD-95 | NP_062567 | 177 | rat | 1 | PKC-A | NP_001099183 | rat | FEGFSYVNPQFVHPILQSAV | 327 |
| PSD-95 | NP_062567 | 177 | rat | 2 | PKC-A | NP_001099183 | rat | FEGFSYVNPQFVHPILQSAV | 327 |
| PSD-95 | NP_062567 | 177 | rat | 3 | GCS-alpha-2 | NP_076446 | rat | SRIKKVSYNIGTMFLRETSL | 345 |
| PSD-95 | NP_062567 | 177 | rat | 1 | Kv1.4 | NP_037103 | rat | DDSETDKNNCSNAKAVETDV | 342 |
| PSD-95 | NP_062567 | 177 | rat | 2 | Kv1.4 | NP_037103 | rat | DDSETDKNNCSNAKAVETDV | 342 |
| PSD-95 | NP_062567 | 177 | rat | 1 | Sec8 | NP_446327 | rat | IICEQAAIKQATKDKKITTV | 346 |
| PSD-95 | NP_062567 | 177 | rat | 1 | SynGAP | NP_851606 | rat | KRLLDAQRGSFPPWVQQTRV | 328 |
| PSD-95 | NP_062567 | 177 | rat | 2 | SynGAP | NP_851606 | rat | KRLLDAQRGSFPPWVQQTRV | 328 |
| PSD-95 | NP_062567 | 177 | rat | 3 | SynGAP | NP_851606 | rat | KRLLDAQRGSFPPWVQQTRV | 328 |
| Mint1 | NP_113967 | 178 | rat | 1 | NaPi-7 | NP_001182128 | rat | LSTGVRARHSYHHPDQDHWC | 347 |
| Mint1 | NP_113967 | 178 | rat | 1 | Presenilin-1 | NP_062036 | rat | ATDYLVQPFMDQLAFHQFYI | 348 |
| Mint1 | NP_113967 | 178 | rat | 2 | Presenilin-1 | NP_062036 | rat | ATDYLVQPFMDQLAFHQFYI | 348 |
| Mint1 | NP_113967 | 178 | rat | 1 | Presenilin-2 | NP_112349 | rat | STDNLVRPFMDTLASHQLYI | 349 |
| Mint1 | NP_113967 | 178 | rat | 2 | Presenilin-2 | NP_112349 | rat | STDNLVRPFMDTLASHQLYI | 349 |
| Mint2 | NP_113968 | 179 | rat | 1 | Presenilin-1 | NP_062036 | rat | ATDYLVQPFMDQLAFHQFYI | 348 |
| Mint2 | NP_113968 | 179 | rat | 2 | Presenilin-1 | NP_062036 | rat | ATDYLVQPFMDQLAFHQFYI | 348 |
| Mint2 | NP_113968 | 179 | rat | 1 | Presenilin-2 | NP_112349 | rat | STDNLVRPFMDTLASHQLYI | 349 |
| Mint2 | NP_113968 | 179 | rat | 2 | Presenilin-2 | NP_112349 | rat | STDNLVRPFMDTLASHQLYI | 349 |
| Mint3 | NP_113969 | 180 | rat | 1 | Presenilin-1 | NP_062036 | rat | ATDYLVQPFMDQLAFHQFYI | 348 |
| Mint3 | NP_113969 | 180 | rat | 2 | Presenilin-1 | NP_062036 | rat | ATDYLVQPFMDQLAFHQFYI | 348 |
| Mint3 | NP_113969 | 180 | rat | 1 | Presenilin-2 | NP_112349 | rat | STDNLVRPFMDTLASHQLYI | 349 |
| Mint3 | NP_113969 | 180 | rat | 2 | Presenilin-2 | NP_112349 | rat | STDNLVRPFMDTLASHQLYI | 349 |
| nNos | NP_434686 | 181 | rat | 1 | CAPON | NP_620277 | rat | LLNVLQRQELGDSLDDEIAV | 350 |
| nNos | NP_434686 | 181 | rat | 1 | PFK-M | NP_113903 | rat | TSDHAHLEHISRKRSGEAAV | 351 |
| CtpA | NP_442119 | 182 | Synecho- | 1 | D1-protein | NP_439906 | Synecho- | LDLASGEQAPVALTAPAVNG | 352 |
| | | | cystis | | | | cystis | | |
| GIPC | NP_001082286 | 183 | Xenopus | 1 | IGF1R | NP_001081734 | Xenopus | HMNGGRKNERALPLPQSSAC | 353 |
| GIPC | NP_001082286 | 183 | Xenopus | 1 | Frizzled-1 | NP_001079207 | Xenopus | NSWRKFYTRLTNSKQGETTV | 354 |

[0109] In some or any of the embodiments herein, a PDZ domain and PDZ-binding peptide pair is selected from Table 2. Table 2 lists three exemplary PDZ domains and respective PDZ-binding peptides. The PDZ-binding peptides for the three PDZ domains listed in Table 2 were isolated by screening a random library of putative PDZ-binding peptides via phage display as reported by Tonikian et al., PLos Biol 6:9 e239 (2008).

TABLE 2
PDZ Domains and screen-identified PDZ-binding peptides

| PDZ | | | | | | |
|---|---|---|---|---|---|---|
| containing | Accession | | | | | |
| protein | No. | Peptides* | | | | |
| ERBB2IP | NP_061165 | ISSSFFDTWV | SSFFRWDTWV | LLRLWMDTWV | KFPTFFDSWV | WHLSWFDDWV |
| | (SEQ ID | (SEQ ID NO: 355) | (SEQ ID NO: 374) | (SEQ ID NO: 393) | (SEQ ID NO: 412) | (SEQ ID NO: 431) |
| | NO: 102) | RHFIFFDTWV | LVRTSWDTWV | FVGSYADTWV | PRSSFFDSWV | NWLSWYDDWV |
| | | (SEQ ID NO: 356) | (SEQ ID NO: 375) | (SEQ ID NO: 394) | (SEQ ID NO: 413) | (SEQ ID NO: 432) |
| | | ITHLFFDTWV | LSFHCWDTWV | FLNRYRDTWV | SSQKFFDSWV | SCNYFYDEWV |
| | | (SEQ ID NO: 357) | (SEQ ID NO: 376) | (SEQ ID NO: 395) | (SEQ ID NO: 414) | (SEQ ID NO: 433) |
| | | RTSRWFDTWV | SASHFYDTWV | CSPSSIDTWV | RSPTFFDSWV | RSKCFLDEWV |
| | | (SEQ ID NO: 358) | (SEQ ID NO: 377) | (SEQ ID NO: 396) | (SEQ ID NO: 415) | (SEQ ID NO: 434) |
| | | NLGRYFDTWV | FGSRDYDTWV | SKGFWTDTWV | XXXXFFDSWV | LGSGWWDTFV |
| | | (SEQ ID NO: 359) | (SEQ ID NO: 378) | (SEQ ID NO: 397) | (SEQ ID NO: 416) | (SEQ ID NO: 435) |
| | | FPHPYFDTWV | RFDRSYDTWV | SFGAFVDTWV | GGHSWFDSWV | NSFCWWDTFV |
| | | (SEQ ID NO: 360) | (SEQ ID NO: 379) | (SEQ ID NO: 398) | (SEQ ID NO: 417) | (SEQ ID NO: 436) |
| | | SSYFPFDTWV | LITLFLDTWV | XXXXXPDTWV | SSGSWFDSWV | SSDSWYDTFV |
| | | (SEQ ID NO: 361) | (SEQ ID NO: 380) | (SEQ ID NO: 399) | (SEQ ID NO: 418) | (SEQ ID NO: 437) |
| | | SNRRHFDTWV | RCCFFLDTWV | HKPHFFETWV | RSWNYFDSWV | SNGRWYDTFV |
| | | (SEQ ID NO: 362) | (SEQ ID NO: 381) | (SEQ ID NO: 400) | (SEQ ID NO: 419) | (SEQ ID NO: 438) |
| | | SNLCHFDTWV | SVTHFLDTWV | HASSFFETWV | VRYSLFDSWV | MFSKFFDTWL |
| | | (SEQ ID NO: 363) | (SEQ ID NO: 382) | (SEQ ID NO: 401) | (SEQ ID NO: 420) | (SEQ ID NO: 439) |
| | | TKFHLFDTWV | TSFLTLDTWV | QLHSWFETWV | SRFLNFDSWV | QVSRFFETWL |
| | | (SEQ ID NO: 364) | (SEQ ID NO: 383) | (SEQ ID NO: 402) | (SEQ ID NO: 421) | (SEQ ID NO: 440) |
| | | GVHSVFDTWV | LFAVFNDTWV | HSSSYFETWV | RMSSRWDSWV | SPTSFFETWL |
| | | (SEQ ID NO: 365) | (SEQ ID NO: 384) | (SEQ ID NO: 403) | (SEQ ID NO: 422) | (SEQ ID NO: 441) |
| | | LPSRVFDTWV | SLPHYNDTWV | GSPPIFETWV | FSHSRWDSWV | STPFWFETWL |
| | | (SEQ ID NO: 366) | (SEQ ID NO: 385) | (SEQ ID NO: 404) | (SEQ ID NO: 423) | (SEQ ID NO: 442) |
| | | CRPGSFDTWV | WCSGRNDTWV | FTRSIFETWV | SRFWPWDSWV | LFGSFLETWL |
| | | (SEQ ID NO: 367) | (SEQ ID NO: 386) | (SEQ ID NO: 405) | (SEQ ID NO: 424) | (SEQ ID NO: 443) |
| | | KLRTGFDTWV | LLTQYDDTWV | SFAKWFQTWV | VSQFWRDSWV | LFSPWLETWL |
| | | (SEQ ID NO: 368) | (SEQ ID NO: 387) | (SEQ ID NO: 406) | (SEQ ID NO: 425) | (SEQ ID NO: 444) |
| | | LFLFFWDTWV | NLYMWDDTWV | PVIWLFHTWV | LPFPFHDSWV | RSVSWIETWL |
| | | (SEQ ID NO: 369) | (SEQ ID NO: 388) | (SEQ ID NO: 407) | (SEQ ID NO: 426) | (SEQ ID NO: 445) |
| | | ISSSFFDTWV | SSFFRWDTWV | LLRLWMDTWV | KFPTFFDSWV | WHLSWFDDWV |
| | | (SEQ ID NO: 370) | (SEQ ID NO: 389) | (SEQ ID NO: 408) | (SEQ ID NO: 427) | (SEQ ID NO: 446) |
| | | MPNSFWDTWV | HPLTDSDTWV | RLDRFLATWV | SHTCWHDSWV | |
| | | (SEQ ID NO: 371) | (SEQ ID NO: 390) | (SEQ ID NO: 409) | (SEQ ID NO: 428) | |
| | | IPPMYWDTWV | SSANGSDTWV | FCRRWFDSWV | LCKAWFESWV | |
| | | (SEQ ID NO: 372) | (SEQ ID NO: 391) | (SEQ ID NO: 410) | (SEQ ID NO: 429) | |
| | | GSYFRWDTWV | LYGGFSDTWV | VTPSFFDSWV | NDRMWFDDWV | |
| | | (SEQ ID NO: 373) | (SEQ ID NO: 392) | (SEQ ID NO: 411) | (SEQ ID NO: 430) | |
| SCRIB | NP_056171 | YLQRFLETHL | LHMLWRETHL | FSSIWRETDL | RCAGYCETSL | |
| | (SEQ ID | (SEQ ID NO: 447) | (SEQ ID NO: 467) | (SEQ ID NO: 487) | (SEQ ID NO: 507) | |
| | NO: 548) | VMRYFLETHL | XASVYRETHL | MHRIWHETDL | RRLPWFETRL | |
| | | (SEQ ID NO: 448) | (SEQ ID NO: 468) | (SEQ ID NO: 488) | (SEQ ID NO: 508) | |
| | | SLRGFLETHL | LLRCWKETHL | RSLPYHETDL | VHLLWRETRL | |
| | | (SEQ ID NO: 449) | (SEQ ID NO: 469) | (SEQ ID NO: 489) | (SEQ ID NO: 509) | |
| | | RTISFLETHL | HSSVWMETHL | RWRPWNETDL | TSKVWRETRL | |
| | | (SEQ ID NO: 450) | (SEQ ID NO: 470) | (SEQ ID NO: 490) | (SEQ ID NO: 510) | |
| | | RSVSFLETHL | MNRFFNETHL | RGTFWSETDL | IRRRWSETFL | |
| | | (SEQ ID NO: 451) | (SEQ ID NO: 471) | (SEQ ID NO: 491) | (SEQ ID NO: 511) | |
| | | RKSFFLETHL | SLRRFLETDL | RRLGFCETDL | LFRRFLETNL | |
| | | (SEQ ID NO: 452) | (SEQ ID NO: 472) | (SEQ ID NO: 492) | (SEQ ID NO: 512) | |
| | | AISYFLETHL | TPRGFLETDL | RHAHYLETWL | ASRIWRETDI | |
| | | (SEQ ID NO: 453) | (SEQ ID NO: 473) | (SEQ ID NO: 493) | (SEQ ID NO: 513) | |
| | | LLRVFLETHL | SRRSFLETDL | RHTTYFETWL | RASYREGDWI | |
| | | (SEQ ID NO: 454) | (SEQ ID NO: 474) | (SEQ ID NO: 494) | (SEQ ID NO: 514) | |
| | | LFRVFLETHL | RRVDFLETDL | FSHYREGDWL | LLRIWRETSI | |
| | | (SEQ ID NO: 455) | (SEQ ID NO: 475) | (SEQ ID NO: 495) | (SEQ ID NO: 515) | |
| | | CLSSWLETHL | RLSRFLETDL | TSHYSEGDWL | IRRIWRETSM | |
| | | (SEQ ID NO: 456) | (SEQ ID NO: 476) | (SEQ ID NO: 496) | (SEQ ID NO: 516) | |
| | | ARDNWLETHL | RAAGFLETDL | RASYKQGDWL | LLRVFRETSM | |
| | | (SEQ ID NO: 457) | (SEQ ID NO: 477) | (SEQ ID NO: 497) | (SEQ ID NO: 517) | |
| | | SLIRYLETHL | RCFGFLETDL | RSSYRVGDWL | | |
| | | (SEQ ID NO: 458) | (SEQ ID NO: 478) | (SEQ ID NO: 498) | | |
| | | RFLGLLETHL | KFLRFLETDL | RASYKPGDWL | | |
| | | (SEQ ID NO: 459) | (SEQ ID NO: 479) | (SEQ ID NO: 499) | | |
| | | TFRSFFETHL | YVRWYLETDL | LLRRYLETSL | | |
| | | (SEQ ID NO: 460) | (SEQ ID NO: 480) | (SEQ ID NO: 500) | | |
| | | FVSIFFETHL | RVSSYLETDL | ILSRFFETSL | | |
| | | (SEQ ID NO: 461) | (SEQ ID NO: 481) | (SEQ ID NO: 501 | | |
| | | FLKRFFETHL | NRFPYLETDL | RFLRFFETSL | | |
| | | (SEQ ID NO: 462) | (SEQ ID NO: 482) | (SEQ ID NO: 502) | | |
| | | SLTRFFETHL | SSRRFFETDL | IRRAYFETSL | | |
| | | (SEQ ID NO: 463) | (SEQ ID NO: 483) | (SEQ ID NO: 503) | | |
| | | RGQSFFETHL | NRPRFFETDL | LGRAWRETSL | | |
| | | (SEQ ID NO: 464) | (SEQ ID NO: 484) | (SEQ ID NO: 504) | | |
| | | NSRSYFETHL | SKSCYFETDL | LARLWRETSL | | |
| | | (SEQ ID NO: 465) | (SEQ ID NO: 485) | (SEQ ID NO: 505) | | |
| | | SIRVWRETHL | NVHRFYETDL | SSGCYRETSL | | |
| | | (SEQ ID NO: 466) | (SEQ ID NO: 486) | (SEQ ID NO: 506) | | |
| NTRA1 | NP_002766 | LWLGWKTWIL | | | | |
| | (SEQ ID | (SEQ ID NO: 518) | | | | |
| | NO: 549) | XXEKSKIWFV | | | | |
| | | (SEQ ID NO: 519) | | | | |
| | | RWKDIETWLL | | | | |
| | | (SEQ ID NO: 520) | | | | |
| | | KSEDSRIWWV | | | | |
| | | (SEQ ID NO: 521) | | | | |
| | | QDVPGKIWFV | | | | |
| | | (SEQ ID NO: 522) | | | | |
| | | LCRVYECFWL | | | | |
| | | (SEQ ID NO: 523) | | | | |
| | | NSRLWDRDVF | | | | |
| | | (SEQ ID NO: 524) | | | | |
| | | KMLWDKIWHV | | | | |
| | | (SEQ ID NO: 525) | | | | |
| | | LCHIFKCFLV | | | | |
| | | (SEQ ID NO: 526) | | | | |
| | | LCRRFFCFYL | | | | |
| | | (SEQ ID NO: 527) | | | | |
| | | RDTIWEIFHF | | | | |
| | | (SEQ ID NO: 528) | | | | |
| | | RGGIDRIWWV | | | | |
| | | (SEQ ID NO: 529) | | | | |
| | | XXXXXKVGGF | | | | |
| | | (SEQ ID NO: 530) | | | | |
| | | LGDIDKSCRV | | | | |
| | | (SEQ ID NO: 531) | | | | |
| | | LPRIWEIWTL | | | | |
| | | (SEQ ID NO: 532) | | | | |
| | | FRLWDVIWLV | | | | |
| | | (SEQ ID NO: 533) | | | | |

*X represents any of the 20 naturally occurring amino acids

[0110] A person of ordinary skill in the art would appreciate that the methods disclosed by Tonikian et al. are useful to generate novel PDZ domain/PDZ-binding peptide pairs useful in the materials and methods disclosed herein. Tonikian et al. describe four PDZ domains that recognize PDZ-binding peptides with cysteines in the 0 position, including APBA3-1 (human amyloid beta A4 precursor protein-binding family A member 3, Accession no. NP_{—}004877), T21G5.4-1 (C. elegans hypothetical protein, Accession no. AAB2899), C25G4.6-2 (C. elegans hypothetical protein, Accession no. NP_{—}502380), and C53B4.4 (C. elegans hypothetical protein, Accession no. NP_{—}001122764). The APBA3-1, T21G5.4-1, C25G4.6-2, and C53B4.4 PDZ domains bind to the consensus sequence FDΩΩ C (SEQ ID NO: 534) wherein Ω is an aromatic amino acid (F, W, or Y). A person of ordinary skill in the art would appreciate that the PDZ domains shown to preferentially bind PDZ-binding peptides with cysteine residues at the 0 position could be engineered to comprise a cysteine residue that forms a disulfide bond with the aforementioned PDZ-binding peptide cysteine. Moreover, a person of ordinary skill in the art would appreciate that structural information could be used to engineer PDZ domain/PDZ-binding peptide pairs comprising disulfide bond-forming cysteine residues similar to the naturally occurring InaD PDZ1 domain/NorpA pair described above. In certain embodiments, a PDZ domain is engineered to replace a native amino acid residue with a cysteine in the peptide binding groove of the PDZ domain or a region outside the peptide binding groove. In other embodiments, a PDZ-binding peptide is engineered to replace a native amino acid residue with a cysteine residue at the C-terminus of a PDZ-binding peptide or a region outside the C-terminal region. It is also contemplated that in some embodiments, a PDZ binding domain and a PDZ-binding peptide are engineered to replace native residues with cysteine residues in order to generate a PDZ domain/PDZ-binding peptide linked by a disulfide bond. PDZ domain/PDZ-binding peptide pairs capable of disulfide bonding are advantageous in that the PDZ domain/PDZ-binding peptide interaction is more stable due to the fact that it is covalent.

### C. HOST CELLS AND CELL SURFACE PROTEINS

[0111] As used herein “cell surface proteins” are naturally occurring proteins or portions thereof that are displayed on the surface of cells, or fragments or variants thereof that retain the ability to be displayed on the cell surface.

[0112] 1. Yeast

[0113] In some or any embodiments, the yeast strain is from a genus selected from the group consisting of Saccharomyces, Pichia, Hansenula, Schizosaccharomyces, Kluyveromyces, Yarrowia, and Candida. In some or any embodiments, the yeast species is selected from the group consisting of S. cerevisiae, P. pastoris, H. polymorpha, S. pombe, K. lactis, Y. lipolytica, and C. albicans.

[0114] In some or any embodiments, the yeast strain has been engineered to carry out glycosylation reactions of the type performed in human cells. Exemplary methods for glycoengineering of yeast are reviewed in Nat Rev Microbiol 3 (2):119-28 (2005).

[0115] The methods and cells of the invention provide PDZ Domains fused to a cell wall protein to enable protein display on the surface of cells. When the host cell is a yeast cell, any suitable cell wall protein may be fused to the PDZ Domain. When the host cell is S. cerevisiae, examples of suitable cell wall proteins include Aga1, Aga2, Aga1, Cwp1, Cwp2, Gas1p, Yap3p, Flo1p, Crh2p, Pir1, Pir2, Pir3, or Pir4, or fragments or variants thereof. When the host cell is H. polymorpha, examples of suitable cell wall proteins include HpSED1, HpGAS1, HpTIP1, or HPWP1. When the host cell is C. albicans, examples of suitable cell wall proteins include Hwp1p, Als3p, or Rbt5p. In example embodiments, the fragments of such cell wall proteins are at least about 20, 25, 30, 35, 40, 45, or 50 amino acids in length. In example embodiments, the variants thereof comprise an amino acid sequence at least 80%, 85%, 90% or 95% identical to at least 100 amino acids of such domains.

[0116] 2. Mammalian Cells

[0117] It is also contemplated that the methods disclosed herein are carried out using mammalian host cells. Examples of useful mammalian host cell lines are Chinese hamster ovary cells, including CHOK1 cells (ATCC CCL61), DXB-11, DG-44, Chinese hamster ovary cells/−DHFR(CHO, Urlaub et al., Proc. Natl. Acad. Sci. USA 77: 4216 (1980)), and CHO cells engineered to produce controlled fucosylation (MAbs. 1(3):230-36 (2009)); monkey kidney CV1 line transformed by SV40 (COS-7, ATCC CRL 1651); human embryonic kidney line (293 or 293 cells subcloned for growth in suspension culture, (Graham et al., J. Gen Virol. 36: 59, 1977); baby hamster kidney cells (BHK, ATCC CCL 10); mouse sertoli cells (TM4, Mather, (Biol. Reprod. 23: 243-251, 1980); monkey kidney cells (CV1 ATCC CCL 70); African green monkey kidney cells (VERO-76, ATCC CRL-1587); human cervical carcinoma cells (HELA, ATCC CCL 2); canine kidney cells (MDCK, ATCC CCL 34); buffalo rat liver cells (BRL 3A, ATCC CRL 1442); human lung cells (W138, ATCC CCL 75); human liver cells (Hep G2, HB 8065); mouse mammary tumor (MMT 060562, ATCC CCL51); TR1 cells (Mather et al., Annals N.Y. Acad. Sci. 383: 44-68 (1982)); MRC 5 cells; FS4 cells; and a human hepatoma line (Hep G2).

[0118] When the host cell is a mammalian cell, examples of portions of cell surface proteins that retain the ability to display proteins on the cell surface include suitable transmembrane domain of any known cell membrane proteins, or a polypeptide with a GPI anchor sequence, or a non-cleavable type II signal anchor sequence. Examples of membrane anchor sequences used for cell display in mammalian cells include PDGFR transmembrane domain (Chesnut et al., J Immunol Methods 193(1): 17-27, (1996); Ho et al., Proc Natl Acad Sci USA 103(25): 9637-42, (2006); incorporated by reference in their entirety), GPI anchor from human decay-accelerating factor (Akamatsu et al., J Immunol Methods, 327(1-2): 40-52 (2007); incorporated by reference in its entirety) and T-cell receptor (TCR) chain (Alonso-Camino et al., PLoS One 4(9): e7174 (2009); incorporated by reference in its entirety). Another example is the use of type II signal anchor sequences (U.S. Pat. No. 7,125,973; incorporated by reference in its entirety). Alternatively, a capture molecule such as an antibody or protein can be fused to a membrane anchor sequence, and displayed on the cell surface in order to capture the protein of interest (U.S. Pat. No. 6,919,183; incorporated by reference in its entirety). In certain embodiments, an artificial cell surface anchor sequence is assembled into, or attached to, the cell membrane of mammalian cells.

[0119] 3. Prokaryotes

[0120] It is also contemplated that the methods disclosed herein are carried out using prokaryotic host cells. Thus, in some or any embodiments, the host cell is a prokaryotic cell. Suitable prokaryotes for this purpose include eubacteria, such as Gram-negative or Gram-positive organisms, for example, Enterobacteriaceae such as Escherichia, e.g., E. coli, Enterobacter, Erwinia, Klebsiella, Proteus, Salmonella, e.g., Salmonella typhimurium, Serratia, e.g., Serratia marcescans, and Shigella, as well as Bacilli such as B. subtilis and B. licheniformis (e.g., B. licheniformnis 41 P disclosed in DD 266,710 published Apr. 12, 1989), Pseudomonas such as P. aeruginosa, and Streptomyces. One preferred E. coli cloning host is E. coli 294 (ATCC 31,446), although other strains such as E. coli B, E. coli X1776 (ATCC 31,537), and E. coli W3110 (ATCC 27,325) are suitable. These examples are illustrative rather than limiting.

[0121] When the host cell is a prokaryotic cell, examples of suitable cell surface proteins include suitable bacterial outer membrane proteins. Such outer membrane proteins include pili and flagella, lipoproteins, ice nucleation proteins, and autotransporters. Exemplary bacterial proteins used for heterologous protein display include LamB (Charbit et al., EMBO J, 5(11): 3029-37 (1986); incorporated by reference in its entirety), OmpA (Freudl, Gene, 82(2): 229-36 (1989); incorporated by reference in its entirety) and intimin (Wentzel et al., J Biol Chem, 274(30): 21037-43, (1999); incorporated by reference in its entirety). Additional exemplary outer membrane proteins include, but are not limited to, FliC, pullulunase, OprF, OprI, PhoE, M isL, and cytolysin. An extensive list of bacterial membrane proteins that have been used for surface display and are contemplated for use in the present invention are detailed in Lee et al., Trends Biotechnol, 21(1): 45-52 (2003), Jose, Appl Microbiol Biotechnol, 69(6): 607-14 (2006), and Daugherty, Curr Opin Struct Biol, 17(4): 474-80 (2007), all incorporated by reference in their entirety. In certain embodiments, the anchor protein is an artificial sequence that is assembled into, or attaches to the outer surface of the bacterial cell.

### D. POLYPEPTIDE-BINDING AGENTS

[0122] In some or any embodiments, the protein of interest is a polypeptide binding agent. The term “polypeptide binding agent,” as used herein, refers to a polypeptide that is capable of specifically binding another molecular entity (e.g., an antigen), or that is capable of binding another molecular entity with a measurable binding affinity. Examples of polypeptide binding agents include antibodies, peptibodies, proteases, scaffold proteins, polypeptides and peptides, optionally conjugated to other peptide moieties or non-peptidic moieties. Molecular entities to which a polypeptide binding agent may bind include any proteinaceous or non-proteinaceous molecule that is capable of eliciting an antibody response, or that is capable of binding to a polypeptide binding agent with detectable binding affinity greater than non-specific binding.

[0123] In example embodiments, the polypeptide binding agent is an antibody. The term “antibody” is used in the broadest sense and includes fully assembled antibodies, tetrameric antibodies, monoclonal antibodies, polyclonal antibodies, multispecific antibodies (e.g., bispecific antibodies, mAb² antibodies,), antibody fragments that can bind an antigen (e.g., Fab′, F′(ab)₂, Fv, single chain antibodies, diabodies, dAbs), and recombinant peptides comprising the forgoing as long as they exhibit the desired biological activity. An “immunoglobulin” or “tetrameric antibody” is a tetrameric glycoprotein that consists of two heavy chains and two light chains, each comprising a variable region and a constant region. Antigen-binding portions may be produced by recombinant DNA techniques or by enzymatic or chemical cleavage of intact antibodies. Antibody fragments or antigen-binding portions include, inter alia, Fab, Fab′, F(ab′)2, Fv, domain antibody (dAb), Fcab™, complementarity determining region (CDR) fragments, single-chain antibodies (scFv), single chain antibody fragments, antibody molecules containing just two CDRs linked by a framework region, e.g., V_{H}CDR1-V_{H}FR2-V_{L}CDR3 fusion peptides, chimeric antibodies, diabodies, triabodies, tetrabodies, minibody, linear antibody; chelating recombinant antibody, a tribody or bibody, an intrabody, a nanobody, a small modular immunopharmaceutical (SMIP), an antigen-binding-domain immunoglobulin fusion protein, a camelized antibody, a VHH-containing antibody, or a variant or a derivative thereof, and polypeptides that contain at least a portion of an immunoglobulin that is sufficient to confer specific antigen binding to the polypeptide, such as one, two, three, four, five, or six CDR sequences, as long as the antibody retains the desired biological activity.

[0124] In a naturally-occurring immunoglobulin, each tetramer is composed of two identical pairs of polypeptide chains, each pair having one “light” (about 25 kDa) and one “heavy” chain (about 50-70 kDa). The amino-terminal portion of each chain includes a variable region of about 100 to 110 or more amino acids primarily responsible for antigen recognition. The carboxy-terminal portion of each chain defines a constant region primarily responsible for effector function. Human light chains are classified as kappa (κ) and lambda (λ) light chains. Heavy chains are classified as mu (μ), delta (Δ), gamma (γ), alpha (α), and epsilon (ε), and define the antibody's isotype as IgM, IgD, IgG, IgA, and IgE, respectively. Within light and heavy chains, the variable and constant regions are joined by a “J” region of about 12 or more amino acids, with the heavy chain also including a “D” region of about 10 more amino acids. See generally, Fundamental Immunology, Ch. 7 (Paul, W., ed., 2nd ed. Raven Press, N.Y. (1989)) (incorporated by reference in its entirety for all purposes). The variable regions of each light/heavy chain pair form the antibody binding site such that an intact immunoglobulin has two binding sites.

[0125] Each heavy chain has at one end a variable domain (VH) followed by a number of constant domains. Each light chain has a variable domain at one end (VL) and a constant domain at its other end; the constant domain of the light chain is aligned with the first constant domain of the heavy chain, and the light chain variable domain is aligned with the variable domain of the heavy chain. Particular amino acid residues are believed to form an interface between the light and heavy chain variable domains (Chothia et al., J. Mol. Biol. 196:901-917, 1987).

[0126] Immunoglobulin variable domains exhibit the same general structure of relatively conserved framework regions (FR) joined by three hypervariable regions or CDRs. From N-terminus to C-terminus, both light and heavy chains comprise the domains FR1, CDR1, FR2, CDR2, FR3, CDR3 and FR4. The assignment of amino acids to each domain is in accordance with the definitions of Kabat Sequences of Proteins of Immunological Interest (National Institutes of Health, Bethesda, Md. (1987 and 1991)), or Chothia & Lesk, (J. Mol. Biol. 196:901-917, 1987); Chothia et al., (Nature 342:878-883, 1989).

[0127] The hypervariable region of an antibody refers to the CDR amino acid residues of an antibody which are responsible for antigen-binding. The hypervariable region comprises amino acid residues from a CDR (residues 24-34 (L1), 50-56 (L2) and 89-97 (L3) in the light chain variable domain and 31-35 (H1), 50-65 (H2) and 95-102 (H3) in the heavy chain variable domain as described by Kabat et al., Sequences of Proteins of Immunological Interest, 5th Ed. Public Health Service, National Institutes of Health, Bethesda, Md. (1991)) and/or those residues from a hypervariable loop (residues 26-32 (L1), 50-52 (L2) and 91-96 (L3) in the light chain variable domain and 26-32 (H1), 53-55 (H2) and 96-101 (H3) in the heavy chain variable domain as described by Chothia et al., J. Mol. Biol. 196: 901-917 (1987).

[0128] Framework or FR residues are those variable domain residues other than the hypervariable region residues.

[0129] “Heavy chain variable region” as used herein refers to the region of the antibody molecule comprising at least one complementarity determining region (CDR) of said antibody heavy chain variable domain. The heavy chain variable region may contain one, two, or three CDRs of said antibody heavy chain.

[0130] “Light chain variable region” as used herein refers to the region of an antibody molecule, comprising at least one complementarity determining region (CDR) of said antibody light chain variable domain. The light chain variable region may contain one, two, or three CDRs of said antibody light chain, which may be either a kappa or lambda light chain depending on the antibody.

[0131] Depending on the amino acid sequence of the constant domain of their heavy chains, immunoglobulins can be assigned to different classes, IgA, IgD, IgE, IgG and IgM, which may be further divided into subclasses or isotypes, e.g. IgG1, IgG2, IgG3, IgG4, IgA1 and IgA2. The subunit structures and three-dimensional configurations of different classes of immunoglobulins are well known. Different isotypes have different effector functions; for example, IgG1 and IgG3 isotypes have ADCC activity. An antibody of the invention, if it comprises a constant domain, may be of any of these subclasses or isotypes, or a variant or consensus sequence thereof, or a hybrid of different isotypes (e.g., IgG1/IgG2 hybrid).

[0132] In exemplary embodiments, an antibody of the invention can comprise a human kappa (κ) or a human lambda (λ) light chain or an amino acid sequence derived therefrom, or a hybrid thereof, optionally together with a human heavy chain or a sequence derived therefrom, or both heavy and light chains together in a single chain, dimeric, tetrameric (e.g., two heavy chains and two light chains) or other form.

[0133] “Monoclonal antibody” refers to an antibody obtained from a population of substantially homogeneous antibodies, i.e., the individual antibodies comprising the population are identical except for possible naturally occurring mutations that may be present in minor amounts.

[0134] “Antibody variant” as used herein refers to an antibody polypeptide sequence that contains at least one amino acid substitution, deletion, or insertion in the variable region of the natural antibody variable region domains. Variants may be substantially homologous or substantially identical to the unmodified antibody.

[0135] A “chimeric antibody,” as used herein, refers to an antibody containing sequence derived from two different antibodies (see, e.g., U.S. Pat. No. 4,816,567) which typically originate from different species. Most typically, chimeric antibodies comprise human and rodent antibody fragments, generally human constant and mouse variable regions.

[0136] A “neutralizing antibody” is an antibody molecule which is able to eliminate or significantly reduce a biological function of an antigen to which it binds. Accordingly, a “neutralizing” antibody is capable of eliminating or significantly reducing a biological function, such as enzyme activity, ligand binding, or intracellular signaling.

[0137] An “isolated” antibody is one that has been identified and separated and recovered from a component of its natural environment. Contaminant components of its natural environment are materials that would interfere with diagnostic or therapeutic uses for the antibody, and may include enzymes, hormones, and other proteinaceous or non-proteinaceous solutes. In some embodiments, the antibody is purified, e.g., (1) to greater than 95% by weight of antibody as determined by the Lowry method, and preferably more than 99% by weight, (2) to a degree sufficient to obtain at least 15 residues of N-terminal or internal amino acid sequence by use of a spinning cup sequenator, or (3) to homogeneity by SDS-PAGE under reducing or nonreducing conditions using Coomassie blue or silver stain. Isolated antibody includes the antibody in situ within recombinant cells since at least one component of the antibody's natural environment will not be present. Ordinarily, however, isolated antibody will be prepared by at least one purification step.

[0138] In other example embodiments the polypeptide binding agent is a protease. The term “protease” as used herein refers to any protein molecule catalyzing the hydrolysis of peptide bonds. It includes naturally-occurring proteolytic enzymes, as well as protease variants. It also comprises any fragment of a proteolytic enzyme, or any molecular complex or fusion protein comprising one of the aforementioned proteins. Proteases include, but are not limited to: trypsin, chymotrypsin, substilisin, thrombin, plasmin, Factor Xa, uPA, tPA, MTSP-1, granzyme A, granzyme B. granzyme M, elastase, chymase, papain, neutrophil elastase, plasma kallikrein, urokinase type plasminogen activator, complement factor serine proteases, ADAMTS 13, neural endopeptidase/neprilysin, furin, and cruzain.

[0139] In further example embodiments the polypeptide binding agent is a scaffold. Protein scaffolds include, but are not limited to, AdNectins, Affibodies, Anticalins, DARPins, engineered Kunitz-type inhibitors, tetranectins, A-domain proteins, lipocalins, repeat proteins such as ankyrin repeat proteins, immunity proteins, α2p8 peptide, insect defensin A, PDZ domains, charybdotoxins, PHD fingers, TEM-1 β-lactamase, fibronectin type III domains, CTLA-4, T-cell receptors, knottins, neocarzinostatin, carbohydrate binding module 4-2, green fluorescent protein, thioredoxin (Gebauer & Skerra, Curr. Opin. Chem. Biol. 13:245-55 (2009); Gill & Damle, Curr. Opin. Biotech 17: 653-58 (2006); Hosse et al, Protein Sci. 15:14-27 (2006); Skerra, Curr. Opin. Biotech 18: 295-3-4 (2007)).

### E. VECTORS

[0140] The vectors of the present invention generally comprise transcriptional or translational control sequences required for expressing the exogenous polypeptide. Suitable transcription or translational control sequences include but are not limited to replication origin, promoter, enhancer, repressor binding regions, transcription initiation sites, ribosome binding sites, translation initiation sites, and termination sites for transcription and translation.

[0141] In some or any embodiments, the polynucleotides encoding a cell surface protein fused to a PDZ Domain and a protein of interest (e.g., polypeptide binding agent or antibody or antigen-binding fragment thereof) fused to a PDZ-binding peptide are present on the same vector. In some or any embodiments, the polynucleotides encoding a cell surface protein fused to a PDZ Domain and a protein of interest (e.g., polypeptide binding agent or antibody or antigen-binding fragment thereof) fused to a PDZ-binding peptide are present on different vectors. As will be appreciated by a person of skill in the art, each fusion-encoding polynucleotide will have suitable transcription and translational control sequences and signal sequences to allow for appropriate expression in the host cell.

[0142] In some or any embodiments, the polynucleotides encoding a cell surface protein fused to a PDZ Domain are integrated into the genome of the host cell. When the host cell is a yeast cell, yeast integrative plasmids (YIp) may be used to integrate the polynucleotides into the yeast cell genome. The site of integration can be targeted by cutting the yeast segment in the YIp plasmid with a restriction endonuclease and transforming the yeast strain with the linearized plasmid. The linear ends are recombinogenic and direct integration to the site in the genome that is homologous to these ends. In addition, linearization increases the efficiency of integrative transformation from 10- to 50-fold. Strains transformed with YIp plasmids are extremely stable, even in the absence of selective pressure.

[0143] In some or any embodiments of the invention, the expression vector is a shuttle vector, capable of replicating in at least two unrelated expression systems. In order to facilitate such replication, the vector generally contains at least two origins of replication, one effective in each expression system. Shuttle vectors may be capable of replicating in a eukaryotic expression system and a prokaryotic expression system. Alternatively, shuttle vectors may be capable of replicating in two different eukaryotic systems, for example in yeast and in mammalian systems, or in two different prokaryotic systems. This enables detection of protein expression in the eukaryotic host and amplification of the vector in the prokaryotic host. In one embodiment, one origin of replication is a CEN ori and one is derived from pUC although any suitable origin known in the art may be used provided it directs replication of the vector. Where the vector is a shuttle vector, the vector contains at least two selectable markers, for example, one for a eukaryotic cell and one for a prokaryotic cell. Any selectable marker known in the art or those described herein may be used provided it functions in the expression system being utilized.

[0144] 1. Origins of Replication

[0145] The origin of replication (generally referred to as an ori sequence) permits replication of the vector in a suitable host cell. The choice of ori will depend on the type of host cells that are employed. Where the host cells are prokaryotes, the expression vector typically comprises an ori directing autonomous replication of the vector within the prokaryotic cells. Non-limiting examples of this class of ori include pMB1, pUC, as well as other bacterial origins.

[0146] Higher eukaryotes contain multiple origins of DNA replication (estimated 104-106 ori/mammalian genome), but the ori sequences are not so clearly defined. The suitable origins for mammalian vectors are normally from eukaryotic viruses. Exemplary eukaryotic ori sequences include, but are not limited to, SV40 ori, EBV ori, and HSV oris. Exemplary ori sequences for yeast cells include, but are not limited to, 2 μm ori sequences and CEN ori sequences.

[0147] 2. Signal Sequences

[0148] Signal sequences from both prokaryotes and eukaryotes share several common characteristics. They are about 15-30 amino acids in length and consist of three regions: a positively charged N-terminal region, a central hydrophobic region, and a more polar C-terminal region. When the host cell is a yeast cell, any signal sequence known in the art capable of directing a protein to be secreted and/or directed to the cell wall can be used. For example, the signal sequence can be derived from Mating Factor α1 (MFα1) (Bitter et al., Proc Natl Acad Sci USA 81(17): 5330-4 (1984)), Invertase (SUC2) (Taussig and Carlson, Nucleic Acids Res 11(6): 1943-54 (1983)), Acid phosphatase (PHOS) (Arima et al., Nucleic Acids Res 11(6): 1657-72 (1983)), Beta glucanase (BGL2) (Achstetter et al., Gene 110(1): 25-31 (1992)), and Inulinase (INU1A) (Chung et al., Biotechnol Bioeng 49(4): 473-9 (1996)). The signal sequence of yeast GPI proteins such as AGA2, AGA1, AGα1, FLO1, GAS1, CWP1, and CWP2 that are covalently linked to the cell wall and have been shown to be compatible for cell surface protein display are also within the scope of the invention (De Groot et al., Yeast 20(9): 781-96 (1992)).

[0149] When the host cell is a prokaryotic cell, signal sequences directing fusion polypeptides for periplasmic secretion include those derived from spA, phoA, ribose binding protein, pelB, ompA, ompT, dsbA, torA, torT, and tolT (de Marco, Microbial Cell Factories, 8:26 (2009)). The pelB signal sequences disclosed in U.S. Pat. Nos. 5,846,818 and 5,576,195 are incorporated by reference in their entirety.

[0150] Also included within the scope of the invention are signal sequences derived from eukaryotic cells that also function as signal sequences in prokaryotic host cells (e.g., E. coli). Such sequences are disclosed in U.S. Pat. No. 7,094,579, the content of which is incorporated by reference in its entirety.

[0151] Watson (Nucleic Acids Research 12:5145-5164 (1984)) discloses a compilation of signal sequences. U.S. Pat. No. 4,963,495 discloses the expression and secretion of mature eukaryotic protein in the periplasmic space of a host organism using a prokaryotic secretion signal sequence DNA linked at its 3′ end to the 5′ end of the DNA encoding the mature protein. Chang et al. (Gene 55:189-196 (1987)) discloses the use of the STII signal sequence to secrete hGH in E. coli. Gray et al. (Gene 39:247-245 (1985)) disclose the use of the natural signal sequence of human growth hormone and the use of the E. coli alkaline phosphatase promoter and signal sequence for the secretion of human growth hormone in E. coli. Wong et al. (Gene 68:193-203 (1988)) disclose the secretion of insulin-like growth factor 1 (IGF-1) fused to LamB and OmpF secretion leader sequences in E. coli, and the enhancement of processing efficiency of these signal sequences in the presence of a pr1A4 mutation. Fujimoto et al. (J. Biotech. 8:77-86 (1988)) disclose the use of four different E. coli enterotoxin signal sequences, STI, STII, LT-A, and LT-B for the secretion of human epidermal growth factor (hEGF) in E. coli. Denefle et al. (Gene 85:499-510 (1989)) disclose the use of OmpA and PhoA signal peptides for the secretion of mature human interleukin 1β. Content of all of the above documents is incorporated by reference in its entirety.

[0152] 3. Promoters

[0153] Suitable promoter sequences for eukaryotic cells include the promoters for 3-phosphoglycerate kinase, or other glycolytic enzymes, such as enolase, glyceraldehyde-3-phosphate dehydrogenase, hexokinase, pyruvate decarboxylase, phosphofructokinase, glucose-6-phosphate isomerase, 3-phosphoglycerate mutase, pyruvate kinase, triosephosphate isomerase, phosphoglucose isomerase, and glucokinase. Other promoters, which have the additional advantage of transcription controlled by growth conditions, are the promoter regions for alcohol dehydrogenase 2, isocytochrome C, acid phosphatase, degradative enzymes associated with nitrogen metabolism, and the aforementioned glyceraldehyde-3-phosphate dehydrogenase, and enzymes responsible for maltose and galactose utilization. Preferred promoters for mammalian cells are SV40 promoter, CMV promoter, β-actin promoter and their hybrids. Preferred promoters for yeast cells include but are not limited to GAL10, GAL1, TEF1, CUP1, ADH2, GPD in S. cerevisiae, and GAP, AOX1 in P. pastoris. A variety of robust prokaryotic promoters are known in the art. Preferred promoters are lac promoter, Trc promoter, T7 promoter and pBAD promoter.

[0154] 4. Terminators

[0155] The terminator sequence preferably contains one or more transcriptional termination sequences (such as polyadenylation sequences) and may also be lengthened by the inclusion of additional DNA sequence so as to further disrupt transcriptional read-through. Preferred terminator sequences (or termination sites) of the present invention have a gene that is followed by a transcription termination sequence, either its own termination sequence or a heterologous termination sequence. Examples of such termination sequences include stop codons coupled to various yeast transcriptional termination sequences or mammalian polyadenylation sequences that are known in the art and widely available.

[0156] 5. Selectable Markers

[0157] In addition to the above-described elements, the vectors may contain a selectable marker (for example, a gene encoding a protein necessary for the survival or growth of a host cell transformed with the vector), although such a marker gene can be carried on another polynucleotide sequence co-introduced into the host cell. Only those host cells into which a selectable gene has been introduced will survive and/or grow under selective conditions. Typical selection genes encode protein(s) that (a) confer resistance to antibiotics or other toxins, e.g., ampicillin, kanamycin, neomycin, G418, methotrexate, etc.; (b) complement auxotrophic deficiencies; or (c) supply critical nutrients not available from complex media. The choice of the proper marker gene will depend on the host cell, and appropriate genes for different hosts are known in the art.

[0158] The vectors encompassed by the invention can be obtained using recombinant cloning methods and/or by chemical synthesis. A vast number of recombinant cloning techniques such as PCR, restriction endonuclease digestion and ligation are well known in the art. One of skill in the art can also use the sequence data provided herein or that in the public or proprietary databases to obtain a desired vector by any synthetic means available in the art. Additionally, using well-known restriction and ligation techniques, appropriate sequences can be excised from various DNA sources and integrated in operative relationship with the exogenous sequences to be expressed in accordance with the present invention.

### F. METHODS OF PREPARING AND SCREENING LIBRARIES

[0159] In some or any embodiments, a library of cells comprising at least 10̂3, at least 10̂4, at least 10̂5, at least 10̂6, at least 10̂7, at least 10̂8, at least 10̂9, or at least 10̂ different host cells, e.g., yeast cells, each such host cell displaying on its surface a different protein of interest (e.g., polypeptide binding agent, antibody, or antigen-binding fragment thereof), is contemplated. Display of the protein of interest, e.g., antibody, or antigen-binding fragment thereof, is accomplished by the expression of fusion proteins utilizing the interaction between a PDZ Domain and a PDZ-binding peptide, as described herein. Methods of generating host cells comprising a library of antibodies or antigen-binding portions thereof, are known in the art and described herein. Such cell libraries are screened using methods known in the art and described herein (such as FACS or MACS) to identify antibodies or antigen-binding fragments thereof that bind target proteins/antigens.

[0160] The invention contemplates methods of producing target-specific antibody or antigen-binding portion thereof comprising creating a library of antibodies or antigen-binding fragments displayed on a cell surface. Libraries of antibodies or antigen-binding fragments may be prepared from immunized or non-immunized sources, and may be natural, semi-synthetic or synthetic (reviewed in Hoogenboom, Nat. Biotech. 23(9): 1105-1116 (2005)).

[0161] The invention also contemplates methods of identifying target-specific antibody or antigen-binding portion thereof comprising contacting the library with target protein or a portion thereof, selecting or isolating or sorting cell(s) that bind target, and obtaining the antibody or antigen-binding fragment thereof from the cell(s). Examples of methods for selection are described below under “Cell Sorting.”

[0162] By way of example, a method for preparing the library of antibodies or antigen-binding fragments for use in cell surface display methods disclosed herein comprises the steps of immunizing a non-human animal comprising human immunoglobulin loci with target antigen or an antigenic portion thereof to create an immune response, extracting antibody producing cells from the immunized animal; isolating RNA from the extracted cells, reverse transcribing the RNA to produce cDNA, amplifying the cDNA, and inserting the cDNA into the display vectors disclosed herein such that antibodies are expressed on the cell surface of a host cell. Methods for constructing and screening an antibody library have been described in Winter et al., PCT Publication No. WO 90/05144, and U.S. Pat. No. 6,057,098 (which are incorporated herein by reference).

[0163] By way of another example, a method for preparing the library of antibodies or antigen-binding fragments for use in cell surface display methods disclosed herein comprises the steps of isolating mRNA from animal, e.g. human, spleen cells or peripheral blood lymphocytes, reverse transcribing the RNA to produce cDNA, amplifying the cDNA, and inserting the cDNA into the display vectors disclosed herein such that antibodies are expressed on the cell surface of a host cell. Alternatively the libraries of different nucleotide sequence may be derived by the in vitro mutagenesis of an existing antibody-coding sequence.

[0164] By way of a further example, libraries of protease variants for use in cell surface display methods disclosed herein may be prepared according to the methods described in WO/04031733 and WO/06125827 (which are incorporated herein by reference). Different strategies of introducing changes in the coding sequences include, but are not limited to, single or multiple point mutations, exchange of single or multiple nucleotide triplets, insertions or deletions of one or more codons, homologous or heterologous recombination between different genes, fusion of additional coding sequences at either end of the encoding sequence or insertion of additional encoding sequences or any combination of these methods.

[0165] In some or any embodiments, a library of proteins of interest is subcloned from an existing display library, e.g. a phage display sub-library created by one or more rounds of panning against an antigen. For example, WO/9847343 describes methods of subcloning nucleic acids encoding displayed polypeptides of enriched libraries from a display vector to an expression vector to produce polyclonal libraries of antibodies and other polypeptides. By way of further example, Jostock et al, J. Immunol. Methods 289, 65-80 (2004) describes batch reformatting of Fab fragments in a phage vector to IgGs in a mammalian vector.

[0166] Methods of screening the libraries are described in the Examples. Additional methods and reagents that can be used in generating and screening antibody display libraries are available in the art (see, e.g., Ladner et al. U.S. Pat. No. 5,223,409; Kang et al. PCT Publication No. WO 92/18619; Dower et al. PCT Publication No. WO 91/17271; Winter et al. PCT Publication No. WO 92/20791; Markland et al. PCT Publication No. WO 92/15679; Breitling et al. PCT Publication No. WO 93/01288; McCafferty et al. PCT Publication No. WO 92/01047; Garrard et al. PCT Publication No. WO 92/09690; Fuchs et al. (1991) Bio/Technology 9:1370-1372; Hay et al. (1992) Hum. Antibod. Hybridomas 3:81-85; Huse et al. (1989) Science 246:1275-1281; McCafferty et al., Nature (1990) 348:552-554; Griffiths et al. (1993) EMBO J. 12:725-734; Hawkins et al. (1992) J. Mol. Biol. 226:889-896; Clackson et al. (1991) Nature 352:624-628; Gram et al. (1992) Proc. Natl. Acad. Sci. USA 89:3576-3580; Garrard et al. (1991) Bio/Technology 9:1373-1377; Hoogenboom et al. (1991) Nuc Acid Res 19:4133-4137; and Barbas et al. (1991) Proc. Natl. Acad. Sci. USA 88:7978-7982.

### G. CELL SORTING

[0167] Flow cytometry is a powerful, high-throughput library screening tool with numerous applications including the isolation of bioactive molecules from synthetic combinatorial libraries, the identification of virulence genes in microorganisms, and the study and engineering of protein functions. Using flow cytometry, large libraries of protein mutants expressed in microorganisms can be screened quantitatively for desired functions, including ligand binding, catalysis, expression level, and stability. Rare target cells, occurring at frequencies below 10⁻⁶, can be detected and isolated from heterogeneous library populations using one or more cycles of cell sorting and amplification by growth. Flow cytometry is particularly powerful because it provides the unique opportunity to observe and quantitatively optimize the screening process. However, the ability to isolate cells occurring at such low frequencies within a population requires consideration and optimization of screening parameters.

[0168] Libraries of cells displaying antibody fragments on the surface are screened for antigen binding by either magnetic activated cell sorting (MACS) or fluorescent activated cell sorting (FACS). FACS employs a plurality of color channels, low angle and obtuse light-scattering detection channels, and impedance channels, among other more sophisticated levels of detection, to separate or sort cells. Any FACS technique may be employed as long as it is not detrimental to the viability of the desired cells. (For exemplary methods of FACS, see U.S. Pat. No. 5,061,620). For libraries >10⁸ in size, typically MACS is used to reduce the size of the library in order to allow subsequent screening by FACS to be done in a feasible time period. In MACS, members of the library that bind biotin labeled antigen are isolated using streptavidin-coated magnetic beads and magnetic separation, then propagated for additional screening. In FACS, simultaneous assessment of antigen binding and antibody expression using two-color detection permits the identification of a population of high affinity clones which are then propagated for subsequent rounds of screening.

[0169] Separation procedures may include magnetic separation, using antigen-coated magnetic beads and “panning,” which utilizes an antigen attached to a solid matrix. Antigens attached to magnetic beads and other solid matrices, such as agarose beads, polystyrene beads, hollow fiber membranes and plastic petri dishes, allow for direct separation. Cells that are bound by the antigen can be removed from the cell suspension by simply physically separating the solid support from the cell suspension. The exact conditions and duration of incubation of the cells with the solid phase-linked antigens will depend upon several factors specific to the system employed. The selection of appropriate conditions, however, is well within the skill in the art.

[0170] In some embodiments, antigens are conjugated to biotin, which then can be removed with avidin or streptavidin bound to a support. In other embodiments, antigens are conjugated to fluorochromes, which can be used with a fluorescence activated cell sorter, to enable cell separation.

### H. AFFINITY MATURATION

[0171] The methods of the invention involving the cell surface display of proteins of interest are particularly useful for affinity maturation. According to the invention, a large number of substitutional variants can be generated, displayed on the cell surface of a plurality of cells, and selected for the desired target-binding characteristics by contacting the cells with target protein, Affinity maturation generally involves preparing and screening polypeptide variants, e.g., antibody variants, that have substitutions within the CDRs of a parent polypeptide and selecting variants that have improved biological properties such as binding affinity relative to the parent polypeptide. A convenient way for generating such substitutional variants is affinity maturation. Briefly, in some methods several hypervariable region sites (e.g. 6-7 sites) are mutated to generate amino substitutions at each site. The antibody variants thus generated are displayed in a monovalent fashion on the surface of a cell. The cell surface-displayed variants are then screened for their biological activity (e.g. binding affinity). See e.g., WO 92/01047, WO 93/112366, WO 95/15388 and WO 93/19172 for examples of phage display methods of affinity maturation.

[0172] Current antibody affinity maturation methods belong to two mutagenesis categories: stochastic and nonstochastic. Error prone PCR, mutator bacterial strains (Low et al., J. Mol. Biol. 260, 359-68 (1996)), and saturation mutagenesis (Nishimiya et al., J. Biol. Chem. 275:12813-20 (2000); Chowdhury, P. S. Methods Mol. Biol. 178, 269-85 (2002)) are typical examples of stochastic mutagenesis methods (Rajpal et al., Proc Natl Acad Sci USA. 102:8466-71 (2005)). Nonstochastic techniques often use alanine-scanning or site-directed mutagenesis to generate limited collections of specific variants. Some methods are described in further detail below.

[0173] 1. Affinity Maturation Via Panning Methods

[0174] Affinity maturation of recombinant antibodies is commonly performed through several rounds of panning of candidate antibodies in the presence of decreasing amounts of antigen. Decreasing the amount of antigen per round selects the antibodies with the highest affinity to the antigen thereby yielding antibodies of high affinity from a large pool of starting material. Affinity maturation via panning is well known in the art and is described, for example, in Huls et al. (Cancer Immunol Immunother. 50:163-71 (2001)). The general concept is readily adaptable to the methods and materials of the present invention.

[0175] 2. Look-Through Mutagenesis

[0176] Look-through mutagenesis (LTM) (Rajpal et al., Proc Natl Acad Sci USA. 102:8466-71 (2005)) provides a method for rapidly mapping the antibody-binding site. For L™, nine amino acids, representative of the major side-chain chemistries provided by the 20 natural amino acids, are selected to dissect the functional side-chain contributions to binding at every position in all six CDRs of an antibody. LTM generates a positional series of single mutations within a CDR where each “wild type” residue is systematically substituted by one of nine selected amino acids. Mutated CDRs are combined to generate combinatorial single-chain variable fragment (scFv) libraries of increasing complexity and size without becoming prohibitive to the quantitative display of all variants. After positive selection, clones with improved binding are sequenced, and beneficial mutations are mapped. Similarly, this general concept is readily adaptable to the methods and materials of the present invention.

[0177] 3. Error-Prone PCR

[0178] Error-prone PCR involves the randomization of nucleic acids between different selection rounds. The randomization occurs at a low rate by the intrinsic error rate of the polymerase used but can be enhanced by error-prone PCR (Zaccolo et al., J. Mol. Biol. 285:775-783 (1999)) using a polymerase having a high intrinsic error rate during transcription (Hawkins et al., J Mol Biol. 226:889-96 (1992)). After the mutation cycles, clones with improved affinity for the antigen are selected using methods and materials of the present invention.

[0179] 4. Gene Site Saturation Mutagenesis (GSSM)

[0180] GSSM involves the introduction of all possible base triplets at a given codon position, thereby resulting in the formation of a library containing all 20 amino acid exchanges at the target position. (Kretz et al, Meth. Enz. 388: 3-11 (2004)). This is achieved at the genetic level by using degenerate mutagenesis primers. Subsequent use of in vitro PCR amplification generates a library of genes possessing all codon variations required for complete saturation of the original gene.

[0181] 5. Targeted Affinity Maturation™ (TAE)

[0182] TAE involves the use of degenerate codons that encode for an equal representation of eighteen amino acid residues including a stop codon and excluding cysteine and methionine. The degenerate codons each collectively code for eighteen amino acid residues eliminating any redundancy which may result in an over-representation of one or more amino acid residues. As a result, the method allows for the generation of smaller, focused libraries that contain eighteen amino acid substitutions at a position of interest (WO09/088,933). This general concept is readily adaptable to the methods and materials of the present invention.

[0183] 6. DNA Shuffling

[0184] Nucleic acid shuffling is a method for in vitro or in vivo homologous recombination of pools of shorter or smaller polynucleotides to produce variant polynucleotides. DNA shuffling has been described in U.S. Pat. No. 6,605,449, U.S. Pat. No. 6,489,145, WO 02/092780 and Stemmer, Proc. Natl. Acad. Sci. USA, 91:10747-51 (1994). Generally, DNA shuffling is comprised of 3 steps: (1) fragmentation of the genes to be shuffled with DNase I, (2) random hybridization of fragments and reassembly or filling in of the fragmented gene by PCR in the presence of DNA polymerase (sexual PCR), and (3) amplification of reassembled product by conventional PCR.

[0185] DNA shuffling differs from error-prone PCR in that it is an inverse chain reaction. In error-prone PCR, the number of polymerase start sites and the number of molecules grows exponentially. In contrast, in nucleic acid reassembly or shuffling of random polynucleotides the number of start sites and the number (but not size) of the random polynucleotides decreases over time.

[0186] In the case of an antibody, DNA shuffling allows the free combinatorial association of all of the CDR1s with all of the CDR2s with all of the CDR3s, for example. It is contemplated that multiple families of sequences can be shuffled in the same reaction. Further, shuffling generally conserves the relative order, such that, for example, CDR1 will not be found in the position of CDR2. Rare shufflants will contain a large number of the best (e.g. highest affinity) CDRs and these rare shufflants may be selected based on their superior affinity.

[0187] The template polynucleotide which may be used in DNA shuffling may be DNA or RNA. It may be of various lengths depending on the size of the gene or shorter or smaller polynucleotide to be recombined or reassembled. Preferably, the template polynucleotide is from 50 bp to 50 kb. The template polynucleotide often should be double-stranded.

[0188] It is contemplated that single-stranded or double-stranded nucleic acid polynucleotides having regions of identity to the template polynucleotide and regions of heterology to the template polynucleotide may be added to the template polynucleotide, during the initial step of gene selection. It is also contemplated that two different but related polynucleotide templates can be mixed during the initial step. These techniques are readily adaptable to the methods and materials of the present invention.

### I. ALTERED GLYCOSYLATION

[0189] Antibody variants that are useful according to the present invention include antibodies that have a modified glycosylation pattern relative to the parent antibody, for example, deleting one or more carbohydrate moieties found in the antibody, and/or adding one or more glycosylation sites that are not present in the antibody.

[0190] Glycosylation of antibodies is typically either N-linked or O-linked. N-linked refers to the attachment of the carbohydrate moiety to the side chain of an asparagine residue. The tripeptide sequences asparagine-X-serine and asparagine-X-threonine, where X is any amino acid except proline, are the recognition sequences for enzymatic attachment of the carbohydrate moiety to the asparagine side chain. The presence of either of these tripeptide sequences in a polypeptide creates a potential glycosylation site. Thus, N-linked glycosylation sites may be added to an antibody by altering the amino acid sequence such that it contains one or more of these tripeptide sequences. O-linked glycosylation refers to the attachment of one of the sugars N-aceylgalactosamine, galactose, or xylose to a hydroxyamino acid, most commonly serine or threonine, although 5-hydroxyproline or 5-hydroxylysine may also be used. O-linked glycosylation sites may be added to an antibody by inserting or substituting one or more serine or threonine residues to the sequence of the original antibody.

[0191] Also contemplated according to the invention are antibody molecules with absent or reduced fucosylation that exhibit improved ADCC activity. A variety of ways are known in the art to accomplish this. For example, ADCC effector activity is mediated by binding of the antibody molecule to the FcγRIII receptor, which has been shown to be dependent on the carbohydrate structure of the N-linked glycosylation at the Asn-297 of the CH2 domain. Non-fucosylated antibodies bind this receptor with increased affinity and trigger FcγRIII-mediated effector functions more efficiently than native, fucosylated antibodies. For example, recombinant production of non-fucosylated antibody in CHO cells in which the alpha-1,6-fucosyl transferase enzyme has been knocked out results in antibody with 100-fold increased ADCC activity (Yamane-Ohnuki et al., Biotechnol Bioeng. 87:614-22 (2004)). Similar effects can be accomplished through decreasing the activity of this or other enzymes in the fucosylation pathway, e.g., through siRNA or antisense RNA treatment, engineering cell lines to knockout the enzyme(s), or culturing with selective glycosylation inhibitors (Rothman et al., Mol. Immunol. 26:1113-23 (1989)). Some host cell strains, e.g. Lec13 or rat hybridoma YB2/0 cell line naturally produce antibodies with lower fucosylation levels. (Shields et al., J Biol. Chem. 277:26733-40 (2002); Shinkawa et al., J Biol. Chem. 278:3466-73 (2003)). An increase in the level of bisected carbohydrate, e.g. through recombinantly producing antibody in cells that overexpress GnTIII enzyme, has also been determined to increase ADCC activity (Umana et al., Nat. Biotechnol. 17:176-80 (1999)). It has been predicted that the absence of only one of the two fucose residues may be sufficient to increase ADCC activity (Ferrara et al., Biotechnol Bioeng. 93:851-61 (2006)).

### J. LABELS

[0192] In some embodiments, the cells and/or polypeptide binding agents are labeled to facilitate their detection. A “label” or a “detectable moiety” is a composition detectable by spectroscopic, photochemical, biochemical, immunochemical, chemical, or other physical means. For example, labels suitable for use in the present invention include, radioactive labels (e.g., ³²P), fluorophores (e.g., fluorescein), electron-dense reagents, enzymes (e.g., as commonly used in an ELISA), biotin, digoxigenin, or haptens as well as proteins which can be made detectable, e.g., by incorporating a radiolabel into the hapten or peptide, or used to detect antibodies specifically reactive with the hapten or peptide.

[0193] Examples of labels suitable for use in the present invention include, but are not limited to, fluorescent dyes (e.g., fluorescein isothiocyanate, Texas red, rhodamine, and the like), radiolabels (e.g., ³H, ¹²⁵I, ³⁵S, ¹⁴C, or ³²P), enzymes (e.g., horse radish peroxidase, alkaline phosphatase and others commonly used in an ELISA), and colorimetric labels such as colloidal gold, colored glass or plastic beads (e.g., polystyrene, polypropylene, latex, etc.).

[0194] The label may be coupled directly or indirectly to the desired component of the assay according to methods well known in the art. Preferably, the label in one embodiment is covalently bound to the biopolymer using an isocyanate reagent for conjugation of an active agent according to the invention. In one aspect of the invention, the bifunctional isocyanate reagents of the invention can be used to conjugate a label to a biopolymer to form a label biopolymer conjugate without an active agent attached thereto. The label biopolymer conjugate may be used as an intermediate for the synthesis of a labeled conjugate according to the invention or may be used to detect the biopolymer conjugate. As indicated above, a wide variety of labels can be used, with the choice of label depending on sensitivity required, ease of conjugation with the desired component of the assay, stability requirements, available instrumentation, and disposal provisions. Non-radioactive labels are often attached by indirect means. Generally, a ligand molecule (e.g., biotin) is covalently bound to the molecule. The ligand then binds to another molecules (e.g., streptavidin) molecule, which is either inherently detectable or covalently bound to a signal system, such as a detectable enzyme, a fluorescent compound, or a chemiluminescent compound.

[0195] The polypeptide binding agents useful according to the present invention can also be conjugated directly to signal-generating compounds, e.g., by conjugation with an enzyme or fluorophore. Enzymes suitable for use as labels include, but are not limited to, hydrolases, particularly phosphatases, esterases and glycosidases, or oxidotases, particularly peroxidases. Fluorescent compounds, i.e., fluorophores, suitable for use as labels include, but are not limited to, fluorescein and its derivatives, rhodamine and its derivatives, dansyl, umbelliferone, etc. Further examples of suitable fluorophores include, but are not limited to, eosin, TRITC-amine, quinine, fluorescein W, acridine yellow, lissamine rhodamine, B sulfonyl chloride erythroscein, ruthenium (tris, bipyridinium), Texas Red, nicotinamide adenine dinucleotide, flavin adenine dinucleotide, etc. Chemiluminescent compounds suitable for use as labels include, but are not limited to, luciferin and 2,3-dihydrophthalazinediones, e.g., luminol. For a review of various labeling or signal producing systems that can be used in the methods of the present invention, see U.S. Pat. No. 4,391,904.

[0196] Means for detecting labels are well known to those of skill in the art. Thus, for example, where the label is radioactive, means for detection include a scintillation counter or photographic film, as in autoradiography. Where the label is a fluorescent label, it may be detected by exciting the fluorochrome with the appropriate wavelength of light and detecting the resulting fluorescence. The fluorescence may be detected visually, by the use of electronic detectors such as charge coupled devices (CCDs) or photomultipliers and the like. Similarly, enzymatic labels may be detected by providing the appropriate substrates for the enzyme and detecting the resulting reaction product. Colorimetric or chemiluminescent labels may be detected simply by observing the color associated with the label. Other labeling and detection systems suitable for use in the methods of the present invention will be readily apparent to those of skill in the art. Such labeled modulators and ligands can be used in the diagnosis of a disease or health condition.

[0197] Although the foregoing invention has been described in detail for purposes of clarity of understanding, it will be obvious that certain modifications may be practiced within the scope of the appended claims. All publications and patent documents cited in the present application are hereby incorporated by reference in their entirety for all purposes to the same extent as if each were so individually denoted. The following examples are provided for illustrative purposes and are not intended to limit the scope of the invention.

### EXAMPLES

### Example 1

### General Materials and Methods

### Enzymes, Antibodies and Recombinant Proteins

[0198] Restriction endonucleases and T4 DNA ligase were purchased from New England Biolabs (Ipswich, Mass.). PCR was performed using KOD Hot Start Polymerase (EMD4Biosciences, Gibbstown, N.J.). Antibodies for flow cytometry were obtained from Invitrogen Corp. (Carlsbad, Calif.). Recombinant human IL-1β was purchased from PeproTech (Rocky Hill, N.J.) and labeled with biotin using the EZ-Link Sulfo-NHS-biotin labeling kit (Thermo Scientific, Rockford, Ill.) according to the manufacturer's instructions.

### Yeast Clones and Strains

[0199] Yeast clones YNR044W (AGA1) and YGL032C (AGA2) were purchased from Open Biosystems (Huntsville, Ala.) while the Saccharomyces cerevisiae strain BJ5465 was obtained from ATCC. The Saccharomyces cerevisiae strain EBY100 is described in Boder and Wittrup, Nat. Biotech. 15, 553-557 (1997).

### Media and Buffers

[0200] SDCAA media: 38 mM Na₂HPO₄, 71 mM NaH₂PO₄, 2% (w/v) D-dextrose, 0.67% (w/v) yeast nitrogen base, 0.5% (w/v) casamino acids, pH 7.5.

SGCAA media: same as SDCAA with galactose instead of D-dextrose.

[0201] Both SDCAA and SGCAA media, tryptophan, uracil, and phosphate buffered saline (PBS) were purchased from TEKnova (Hollister, Calif.). Wash buffer for flow cytometry consists of filter sterilized PBS containing 0.1% (w/v) BSA (Sigma-Aldrich, St. Louis, Mo.).

[0202] Transfection media: HyClone SFMTransfx-293 Media supplemented with 4 mM L-glutamine.

[0203] Growth media: HyClone SFMTransfx-293 Media, 10% (w/v) HyClone FBS, 4 mM L-glutamine, and 250 geneticin.

[0204] Both HyClone SFMTransfx-293 media and FBS were purchased from Thermo Scientific (Rockford, Ill.) while L-gluatamine and geneticin were purchased from Invitrogen Corp (Carlsbad, Calif.)

### Yeast Transformation and Growth

[0205] Chemically competent yeast cells were prepared using Frozen-EZ Transformation II™ kit (Zymo Research, Orange, Calif.). Transformed cells were grown on dextrose media plates for 72 hours at 30° C. Isolated colonies were then grown as cultures for 16 hours at 30° C. with shaking (250 rpm). The dextrose media was replaced with galactose media and cells were grown for 20 hours to induce antibody expression.

### Mammalian Cell Transfection and Growth

[0206] Twenty micrograms of plasmid DNA was incubated with 20 μg of Lipofectamine™ 2000 reagent (Invitrogen Corp, Carlsbad, Calif.) in 1 ml of transfection media for 25 minutes at room temperature. The mixture was then added drop-wise to 1.6×10⁷ human embryonic kidney (HEK) 293E cells in 20 ml of transfection media. Cells were then grown at 37° C. with 5% CO₂ and shaking (95 rpm). Cells were harvested after 4 days for flow cytometric analysis and 7 days for protein expression and purification. To purify soluble IgG, transfected cells were centrifuged (3200 rpm for 10 minutes at 4° C.) and the conditioned media was removed and incubated with 200 μl of Protein A Sepharose CL-4B (GE Healthcare, Waukesha, Wis.) either for 2 hours at room temperature or for 16 hours at 4° C. The resin was washed with PBS and incubated with 700 μl of elution buffer (0.2 M Glycine/HCl, pH 2.5) followed by the addition of neutralization buffer (1 M Tris-HCl, pH 9.0). Purified IgGs were then dialyzed into PBS for 16 hours at 4° C. and analyzed by HPLC and SDS-PAGE for purity.

### Flow Cytometry

[0207] Two million yeast cells or 5×10⁴ HEK293 cells were washed with wash buffer then incubated with biotin labeled IL-1β (100 nM) and chicken anti-c-Myc (4 μg/ml) for 1 hour at room temperature. The cells were then washed and incubated with streptavidin-phycoerythrin (PE) (10 μg/ml), anti-chicken Alexa Fluor® 647 conjugate (20 μg/ml) and anti-hemagglutinin (HA) Alexa Fluor® 488 conjugate (10 μg/ml) for 30 minutes on ice and protected from light. The cells were then washed one final time before being analyzed on a either a C6 flow cytometer (Accuri Cytometers Inc., Ann Arbor, Mich.) or a FACScan instrument (BD, Franklin Lakes, N.J.). Typically, 10,000 events were collected per sample. Subsequent analysis was performed using FlowJo software (Tree Star Inc., Ashland, Oreg.).

### Example 2

### Construction of Aga2 Fusion Display Vector as a Benchmark

[0208] The vector pTam14 containing GAL1 promoter, DNA coding for Aga2 signal peptide (1-18), BamHI restriction site for cloning, DNA coding for c-Myc epitope tag, DNA coding for the mature Aga2 protein (19-87), MATα transcription terminator, TRP1 gene, CEN6/ARSH4 origin, AMP resistance gene, and pUC bacterial origin was synthesized by GenScript (Piscataway, N.J.).

[0209] The clone, XPA28 scFv, was identified after three rounds of soluble panning of an antibody phage display library against biotin labeled IL-1β. Sequencing revealed that XPA28 scFv possessed a heavy chain and lambda light chain corresponding to families VH3 and VL1. XPA28 scFv was subcloned into the vector pXHMV (Rondon et al. PCT Publication No. WO 2010/040073) in which the scFv is fused in frame with the epitope tags 6×His, c-Myc, V5, and pI11 from bacteriophage.

[0210] The vector pTam15 was constructed by first PCR amplifying XPA28 scFv from the plasmid pXHMV/XPA28 scFv using forward (Tam40b: TCTGTTATTGCTAGCGTTTTAGCACAGGTCCAGCTGGTGCAG) (SEQ ID NO: 18) and reverse (Tam41: CTTTTGTTCGGATCCTGCGGCCCCGTGATGGTG) (SEQ ID NO: 19) primers and digested using NheI and BamHI as was the acceptor vector pTam14. The fragment and vector were ligated resulting in the vector pTam15 (FIG. 1).

### Example 3

### Vector Construction for the NorpA Tether Display System

[0211] The vector pTam16 was constructed by first synthesizing the PDZ1 domain of InaD (11-107) and then PCR amplifying the fragment using the forward (Tam55: GTTATTGCTAGCGTTTTAGCAGCGGGTGAGCTC) (SEQ ID NO: 20) and reverse (Tam56: TTGTTCGGATCCCTTGTCGAAGGTCTGA) (SEQ ID NO: 21). Both the amplified fragment and pTam14 were digested NheI and BamHI and ligated together resulting in the vector pTam16 (FIG. 2).

[0212] The vector pTam21 was constructed as follows: DNA coding for the V5 tag (GKPIPNPLLGLDST) (SEQ ID NO: 22) in pXHMV/XPA28 scFv was replaced with DNA coding for the NorpA tether which consists of the C-terminal seven residues (GKTEFCA) (SEQ ID NO: 16) of NorpA (1089-1095). This was done by QuikChange™ site-directed mutagenesis (Stratagene, La Jolla, Calif.) using mutagenic primers Tam59 (GATCTGAAGGCCGCAGGCAAGACCGAGTTCTGCGCCTGATGAGAGGCTAGTTCT GC) (SEQ ID NO: 23) and Tam60 (GCAGAACTAGCCTCTCATCAGGCGCAGAACTCGGTCTTGCCTGCGGCCTTCAGA TC) (SEQ ID NO: 24). The DNA corresponding to XPA28 scFv including His6, c-myc tag and NorpA was PCR amplified using forward (Tam71: GTTATTGCTAGCGTTTTAGCACAGGTCCAGCTGGTG) (SEQ ID NO: 25) and reverse (Tam72: CAGCGGGTTTAAACTCATCAGGCGCAGA) (SEQ ID NO: 26) primers, digested with NheI and PmeI and ligated into NheI/PmeI digested pTam14.

[0213] The vector pTam27 was constructed by QuikChange™ mutagenesis of the plasmid pTam16 using mutagenic primers Tam93a (AATATTTTCTGTTATTGCCAGCGTTTTAGCAGCGGGTGAG) (SEQ ID NO: 27) and Tam94 (CTCACCCGCTGCTAAAACGCTGGCAATAACAGAAAATATT) (SEQ ID NO: 28). This introduced a silent mutation to abolish a NheI restriction site within the Aga2 signal peptide.

[0214] The vector pTam28 was constructed as follows: the DNA corresponding to the Aga2 signal peptide, XPA28 scFv, His6 tag, c-Myc tag, NorpA tether, and MATα terminator was PCR amplified using pTam21 as the template and forward (Tam89: GTTATTGCTAGCGTTTTAGC) (SEQ ID NO: 29) and reverse (Tam90: CGGCTTCTAATCCGTGTTATTACTGAGTAGTATTTATTTAAG) (SEQ ID NO: 30) primers. The DNA corresponding to the Gal1 promoter, Aga2 signal peptide, InaD PDZ1 and c-Myc tag were PCR amplified using pTam27 as template and forward (Tam91: CTACTCAGTAATAACACGGATTAGAAGCCG) (SEQ ID NO: 31) and reverse (Tam92: GGAGATAAGCTTTTGTTCG) (SEQ ID NO: 32) primers. The two PCR fragments contain 30 base pairs of homology and were combined using overlap PCR extension. Briefly, a mixture of the two fragments (100 ng each) was thermocycled for 6 cycles before pausing at the final extension step (70° C.). Subsequently the outermost primers (Tam89 and Tam92) were added to a final concentration of 300 nM and the reaction was allowed to continue for an additional 26 cycles. A DNA band corresponding to the combined fragment (2127 base pairs) was gel purified and digested using NheI and HindIII, as was the acceptor vector pTam14. The fragment and vector were subsequently ligated resulting in the vector pTam28 (FIG. 3).

### Example 4

### Construction and Validation of the NorpA Tether Display System

[0215] EBY100 cells were transformed with pTam15, 16 and 28 and grown on SDCAA media. Single colonies were grown and induced with SGCAA media. For flow cytometry analysis, cells were washed and labeled as described in Example 1. As shown in FIG. 4A, cells displaying XPA28 scFv using the NorpA tether system (pTam28) bind IL-10 and are positive for c-Myc staining as observed by PE and Alexa Fluor 647 fluorescence. However, antigen binding and scFv expression is not a direct correlation as the c-Myc epitope tag is present at both the carboxyl terminus of XPA28 scFv and the InaD PDZ1. Compared to cells displaying XPA28 scFv as an Aga2 fusion (pTam15, FIG. 4B), the amount of IL-1β binding by the NorpA tether system is lower. As a control, cells expressing InaD PDZ1 alone (pTam16) do not bind IL-1β (FIG. 4C). Cells expressing pTam15 and 28 were then incubated with increasing concentrations of biotin labeled IL-10 (16.9 pM-1 μM) and analyzed by flow cytometry. The mean PE fluorescence for each sample was determined and calculated as a percentage of total. This was then plotted against IL-10 concentration and the dissociation constant (K_{D}) was determined as the concentration at the half maximum (EC₅₀). As shown FIG. 5, the K_{D} for IL-1β binding by XPA28 scFv using the two display systems was similar: 9.2 nM for the NorpA tether system (pTam28) and 20.5 nM for Aga2 fusion display (pTam15); and within the range of error for this type of analysis (Chao, Lau et al. 2006). These results suggest that the affinity of XPA28 for IL-1β is not compromised in the NorpA tether system. Rather the lower level of antigen binding observed using the NorpA tether system (FIG. 4A) compared to the Aga2 fusion display (FIG. 4B) may be a result of a decrease in the total level of scFv found on the cell surface. Finally, the K_{D} determined using NorpA tether system is in good agreement to the K_{D} for soluble XPA28 reformatted as an IgG1 (15.1±4.5 nM) as determined by Biacore.

[0216] The vector pTam18 was constructed as follows: a DNA fragment consisting of DNA coding for Aga2 signal peptide (1-18), XPA28 scFv, c-Myc tag, glycine serine linker and Aga2 (19-87) was generated by overlap extension PCR using four smaller fragments. First, an oligo corresponding to Aga2 signal peptide was synthesized (RbsAga2SS 1: CGACTCACTATAGGGAATATTAAGCTAATTCTACTTCATACATTTTCAATTAAGA TGCAGTTACTTCGCTGTTTTTCAATATTTTCTGTTATTGCTAGCGTTTTAGCACAG GTCCAGCTGGTG) (SEQ ID NO: 33) and PCR amplified using forward and reverse primers (RbsAga2SS 2: CGACTCACTATAGGGAATATTAAG (SEQ ID NO: 34) and RbsAga2SS 3: CACCAGCTGGACCTG (SEQ ID NO: 35), respectively). The vector pXHMV/XPA28 scFv was used as the template for PCR amplification using the following forward (IL1 scFv 1: CAGGTCCAGCTGGTGCAG (SEQ ID NO: 36) and reverse (IL1 scFv 2: TGCGGCCCCGTG (SEQ ID NO: 37)) primers. An oligo corresponding to c-Myc epitope tag and glycine serine linker was synthesized (MycGS 1: CACGGGGCCGCAGGATCCGAACAAAAGCTTATCTCCGAAGAAGACTTGGGTGGT GGTGGATCTGGTGGTGGTGGTTCTGGTGGTGGTGGTTCTCAGGAACTGACAACTA TATGCGAG) (SEQ ID NO: 38) and PCR amplified using forward and reverse primers (MycGS 2: CACGGGGCCGCA (SEQ ID NO: 39) and MycGS 3: CTCGCATATAGTTGTCAGTTCCTG (SEQ ID NO: 40), respectively). The mature Aga2 protein (19-87) was amplified from YGL032C (Open Biosystems, Huntsville, Ala.) using the forward (Aga2 1: CAGGAACTGACAACTATATGCGAG) (SEQ ID NO: 41) and reverse (Aga2 2: GGATCAGCGGGTTTAAACTCAAAAAACATACTGTGTGTTTATGGG) (SEQ ID NO: 42) primers. The four fragments were gel purified separately and combined by overlap extension PCR as described in Example 1 using primers RbsAga2SS 2 and Aga2 2. A single fragment (1209 base pairs) corresponding to the size of all four fragments was gel purified and cloned into SacI/PmeI digested pYC2/CT (Invitrogen Corp, Carlsbad, Calif.) using In-Fusion® cloning (Clontech, Mountain View, Calif.).

[0217] The vector pTam32 was constructed as follows: a DNA fragment coding for c-Myc tag, glycine serine linker and mature Aga1 protein (23-726) was generated by overlap extension PCR using two fragments. An oligo corresponding to c-Myc tag and a glycine serine linker was synthesized (Tam121: GAACAAAAGCTTATCTCCGAAGAAGACTTGGGTGGTGGTGGATCTGGTGGTGGT GGTTCTGGTGGTGGTGGTTCTTTGGCATCTGATCC) (SEQ ID NO: 43) and PCR amplified using forward (Tam159: GAACAAAAGCTTATCTCCG) (SEQ ID NO: 44) and reverse (Tam131: GGATCAGATGCCAAAGA) (SEQ ID NO: 45) primers. Aga1p (23-176) was amplified from clone YNR044W (Open Biosystems, Huntsville, Ala.) using forward (Tam133: TTTGGCATCTGATCC) (SEQ ID NO: 46) and reverse (Tam122: CAGCGGGTTTAAACTTAACTGAAAATTACATTGC) (SEQ ID NO: 47) primers. The two fragments were gel purified and combined by overlap extension PCR using primers Tam159 and Tam122 to amplify. The combined fragment and pTam18 were both digested with HindIII and PmeI and ligated, resulting in the vector pTam32 (FIG. 6).

[0218] EBY100 and BJ5465 cells were transformed with pTam15 and 32 respectively. Transformants were identified after growth on either SDCAA (EBY100, pTam15) or SDCAA containing 40 μg/ml tryptophan (BJ5465, pTam32). Single colonies were then grown in liquid media and induced with the corresponding galactose media (SGCAA or SGCAA with 40 μg/ml tryptophan). For flow cytometry analysis, cells were washed, labeled and analyzed as described in Example 1. As shown in FIG. 7, the antigen binding and c-Myc staining properties of pTam15 (A) and pTam32 (B) transformed cells were very similar as observed by PE and Alexa Fluor 647 fluorescence, indicating that Aga1 is a suitable alternative to Aga2 as a cell wall anchor for XPA28 scFv.

[0219] pTam34 was constructed by first eliminating the NheI restriction site between the URA3 gene and CEN6/ARSH4 origin of replication in pTam32 using QuikChange™ mutagenesis and the following forward (Tam137: GATGAATTGAATTGAAAAGCTAGTTTATCGATGGGTCCTTTTCATCACGTGC) (SEQ ID NO: 48) and reverse (Tam138: GCACGTGATGAAAAGGACCCATCGATAAACTAGCTTTTCAATTCAATTCATC) (SEQ ID NO: 49) primers. The resulting plasmid, pTam32b was digested with NheI and HindIII and served as the acceptor vector for the following insert. A DNA fragment corresponding to XPA28 scFv, His6, c-Myc tag, NorpA tether, MATα terminator, GAL1 promoter, InaD PDZ1, and c-Myc tag was excised from pTam28 using NheI and HindIII. The insert and the acceptor vector were ligated resulting in the vector pTam34 (FIG. 8).

[0220] EBY100 and BJ5465 cells were transformed with pTam28 and 34 respectively and grown on either SDCAA (EBY100, pTam28) or SDCAA containing 40 μg/ml tryptophan (BJ5465, pTam34). Cells were induced with the corresponding galactose media (SGCAA or SGCAA with 40 μg/ml tryptophan) prior to labeling for flow cytometry analysis. As shown in FIG. 9, the antigen binding and c-Myc staining properties of pTam28 (A) and pTam34 (B) transformed cells were very similar as observed by PE and Alexa Fluor 647 fluorescence. This indicates that Aga1 was a suitable alternative to Aga2 in anchoring the InaD PDZ1 to the yeast cell wall.

[0221] pTam35 was constructed as follows: the DNA sequence (Tam68: ACCTTCGACAAGAGATCCTGTTACCCATACGACGTTCCAGACTACGCTTCTTTGG GTGGTGGTGGATCTGGT) (SEQ ID NO: 50) corresponding to the hemagglutinin (HA) epitope (CYPYDVPDYASL) (SEQ ID NO: 51) was synthesized and PCR amplified using forward (Tam69: ACCTTCGACAAGAGATCC) (SEQ ID NO: 52) and reverse (Tam70: ACCAGATCCACCACC) (SEQ ID NO: 53) primers. The amplified insert contains regions of homology to the sequence immediately 5′ and 3′ to the c-Myc tag at the carboxyl terminus of InaD PDZ1. The plasmid pTam34 was digested with HindIII and the insert was cloned using In-Fusion® cloning. As shown in the vector map for pTam35, the c-Myc epitope tag fused to InaD PDZ1 is now replaced with a HA tag (FIG. 10).

[0222] BJ5465 cells were transformed with pTam35, grown with SDCAA containing 40 μg/ml tryptophan and induced with SGCAA containing 40 μg/ml tryptophan prior to labeling. Both non-induced and induced cells were analyzed by flow cytometry (FIG. 11). As shown in FIG. 11, induced cells (no fill) bind IL-1β (A) and express InaD PDZ1 (C) as assessed by PE and Alexa Fluor 488 fluorescence, compared to non-induced cells (grey fill). However no scFv was detected as observed by Alexa Fluor 647 fluorescence (B). As the cells did bind IL-1β, this suggests that the lack of Alexa Fluor 647 fluorescence was due to the inability of the c-Myc antibody to bind the epitope tag and not due to the lack of scFv expression. We further postulated that the complex formation between the NorpA tether and InaD PDZ1 may occlude the binding of the c-Myc antibody to the tag. To address this issue, we constructed the vector pTam37, in which the c-Myc epitope tag was separated further in primary sequence from the NorpA tether.

[0223] The vector pTam37 was constructed by first PCR amplifying the vector backbone of pTam35 using forward (Tam145: CCGCTGATCTGATAACAA) (SEQ ID NO: 54) and reverse (Tam146: GTCAGCTTGGTCCCA) (SEQ ID NO: 55) primers. The DNA fragment (Tam142: TGGGACCAAGCTGACCGTCCTAGGCCTCGGGGGCCTGGAACAAAAACTCATCTC AGAAGAAGATCTGGGAGGGGCCGCACATCATCATCACCATCACGGTGGCGCCGC CGGCAAGACCGAGTTCTGCGCCTGATGAGTTTAAACCCGCTGATCTGATAACAA) (SEQ ID NO: 56) which corresponds to c-Myc, His6 and NorpA tether in this specific order was synthesized and PCR amplified with forward (Tam143: TGGGACCAAGCTGAC) (SEQ ID NO: 57) and reverse (Tam144: TTGTTATCAGATCAGCGG) (SEQ ID NO: 58) primers. The amplified fragment contains 18 base pairs of homology to the amplified backbone which allowed for the cloning using In-Fusion®. As shown in FIG. 12, pTam37 differs from pTam35 in that the c-Myc tag now precedes the His6 tag.

[0224] BJ5465 cells were transformed with pTam37, grown with SDCAA containing 40 μg/ml tryptophan and induced with SGCAA containing 40 μg/ml tryptophan prior to labeling. Both non-induced and induced cells were analyzed by flow cytometry. As shown in FIG. 13, induced cells (no fill) bind IL-1β (A) and express InaD PDZ1 (B) whereas non-induced cells (grey fill) do not. A comparison of Alexa Fluor 647 fluorescence between pTam37 (FIG. 13B) and pTam35 (FIG. 11B) indicates a significant difference in detection of the c-Myc epitope tag presumably due to a difference in tag accessibility between the two vectors. In light of these results, the plasmid pTam37 was chosen as the vector for construction of a small non-immune scFv library.

### Example 5

### NorpA Tether Display of an IgG on Mammalian Cells

[0225] An IgG1 antibody, anti-KLH8, was used to as a model antibody for evaluating protein expression during the vector construction process. The DNA corresponding to the entire heavy chain (HC) of anti-KLH8 was PCR amplified using the following primers: KLH8-HC-XbaI Fwd. Primer (ATATATTCTAGAATGGGATGGTCATGTATCATC) (SEQ ID NO: 59) and KLH8-HC-NotI Rev. Primer (ATATATGCGGCCGCTCATTTACCCGGGGACAGGGA) (SEQ ID NO: 60) and ligated into the pIRES vector (Clontech, Mountain View, Calif.) by restriction site cloning using XbaI and NotI. This plasmid was then digested with EcoRI and XbaI and a synthetic IRES2 sequence (Blue Heron, Bothell, Wash.) was cloned in place of IRES 1. The IRES2 sequence and the anti-KLH8 HC were then PCR amplified using primers: IRES2 Xho1 Fwd. Primer (ATATATCTCGAGAATTCACGCGTCGAGCATGCAT) (SEQ ID NO: 61) and Xho1-KLH8 HC Rev. Primer (ATATATCTCGAGTCATTTACCCGGGGACAGGGA) (SEQ ID NO: 62). The amplified fragment was digested with XhoI and cloned into the acceptor vector, pMXT13/anti-KLH8 VL, a transient expression vector containing the constant lambda (CX) light chain (XOMA, Berkeley, Calif.; WO06/060769) and the anti-KLH8 VL at the single XhoI site. The resulting vector pXIBM-IRES2, in which the anti-KLH8 LC and HC are regulated by a CMV promoter and IRES2 respectively, now allows the expression of a full IgG from a single vector. Next, the IgG leader peptide preceding the anti-KLH8 LC was replaced with US2 signal peptide (U.S. Pat. No. 7,094,579). A DNA fragment consisting of the US2 signal peptide, anti-KLH8 LC, and IRES2 was generated by a two step PCR reaction. The primary PCR reaction consisted of amplifying the anti-KLH8 LC and IRES2 using an extended forward primer containing the US2 sequence (US2-KLH8 LC Fwd. Primer: TTCTGCTTGTGGCCCTGCAGGCCCAAGCGCAGCCTGTGCTGACTCAGCCC) (SEQ ID NO: 63) and a reverse primer (IRES2-PmlI Rev. Primer: GCAGGTGTATCTTATACACGTGGC) (SEQ ID NO: 64). A secondary PCR reaction using the reverse primer above and a second forward primer (Sal1-US2 Fwd. Primer: ATATATGTCGACACCATGCGTACTCTGGCTATCCTTGCAGCTATTCTGCTTGTGGC CCTGCAGGCCCAA) (SEQ ID NO: 65) was done to complete the US2 signal sequence and to add a SalI site for cloning. The PCR fragment was then cloned into pXIBM-IRES2 by restriction site cloning using the SalI and PmlI sites resulting in the vector pXIBM-US2-IRES2. Finally, the anti-KLH8 LC and HC were replaced with the corresponding variable regions of XPA28. The XPA28 LC and HC were amplified from the template pXHMV/XPA28 scFv using the following primers: Sfi1-VL Fwd. primer (ATATATGTGGCCCTGCAGGCCCAAGCGCAGGCTGTGCTGACTCAGCCG) (SEQ ID NO: 66), VL AvrII Rev. primer (ATATATAGGCCTAGGACGGTCAGCTTGGT) (SEQ ID NO: 67), Nco1-VH Fwd. primer (ATATATGCCATGGCCCAGGTCCAGCTGGTGCAGTCT) (SEQ ID NO: 68), and VH Nhe1 Rev. primer (ATATATGCTAGCACTGGAGACGGTGACCAGGGTGCCT) (SEQ ID NO: 69). The LC and HC of XPA28 were inserted into pXIBM-US2-IRES2 by restriction site cloning using SfiI/AvrII and NcoI/NheI restriction enzyme pairs respectively. The resulting vector pXIBM14 (FIG. 14A) features the VL and VH of XPA28 fused in frame with Cλ and the CH1-3 regions of IgG1 respectively. Cells transiently transfected with pXIBM14 expressed soluble XPA28 IgG which was purified by Protein A Sepharose. The electrophoretic mobility of the HC and LC were as expected, indicating that the XPA28 scFv was correctly reformatted as a full length antibody (XPA28 IgG) (FIG. 14B).

[0226] In order to display the XPA28 IgG on the cell surface, the NorpA tether was fused to the carboxyl terminus of the heavy chain. The NorpA tether was PCR amplified from pTam37 using the forward primer Nhe1-HC Fwd (ATATATGCTAGCACAAAGGGCCCATCGGTCTTC) (SEQ ID NO: 70) and one of the following three reverse primers in order to generate a tether with no attached spacer (Xho1-PDZ-NoAA Rev: ATATATCTCGAGTCAGGCGCAGAACTCGGTCTTGCCTTTACCCGGGGACAGGGAG AG) (SEQ ID NO: 71), a 3 amino acid spacer (Xho1-PDZ-3AA Rev: ATATATCTCGAGTCAGGCGCAGAACTCGGTCTTGCCTGCGGCCCCTTTACCCGGG GACAGGGAGAG) (SEQ ID NO: 72), and a 5 amino acid attached spacer (Xho1-PDZ-5AA Rev: ATATATCTCGAGTCAGGCGCAGAACTCGGTCTTGCCTGAACCGCCGCCTCCTTTA CCCGGGGACAGGGAGAG) (SEQ ID NO: 73).

[0227] The three different NorpA tether PCR fragments were cloned into pXIBM14 at the Nhe1 and Xho1 restriction sites generating the three resulting vectors: pXIBM32, which contains no spacer between the CH3 and NorpA tether; pXIBM34, which contains the 3 amino acid spacer (GAA) spacer; and pXIBM36, which contains the five amino acid spacer (GGGGS) (SEQ ID NO: 74) are shown in FIG. 15.

[0228] The vector pTam29 was constructed as follows: a DNA fragment coding for the IgG leader peptide, InaD PDZ1, c-Myc epitope, glycine serine linker and the transmembrane domain of platelet derived growth factor receptor-β (PDGFR-β) was generated by overlap extension PCR using two fragments. The DNA corresponding to InaD PDZ1 was PCR amplified using forward (Tam95: AACTGCAACTGGAGTGCATTCCGCGGGTGAGCTCATTCACAT) (SEQ ID NO: 75) and reverse (Tam96: CTGGCCCACAGCAGAACCACCACCACCAGAACC) (SEQ ID NO: 76) primers. The 49 amino acid transmembrane domain of PDGFR-β (513-561) was PCR amplified from the plasmid pDisplay (Invitrogen, Carlsbad, Calif.) using forward (Tam97: GGTTCTGGTGGTGGTGGTTCTGCTGTGGGCCAG) (SEQ ID NO: 77) and reverse (Tam98: CTTTGTGACGGGCGGGCTCGAGGCCGTCGCACCTAACGTGGCTTCTTC) (SEQ ID NO: 78) primers. The two fragments were gel purified and combined by overlap extension PCR using primers Tam99 (AACTGCAACTGGAGTGCATTCC) (SEQ ID NO: 79) and Tam100 (CTTTGTGACGGGCGGG) (SEQ ID NO: 80). Both the combined fragment and the acceptor vector pMXT32 (XOMA, Berkeley, Calif.; WO06/060769) were digested with BsmI and XhoI and ligated together resulting in the vector pTam29 (FIG. 15B).

[0229] HEK 293E cells were transfected as described in Example 1. Ninety-six hours post transfection, cells were analyzed by flow cytometry for IL-1β binding and InaD PDZ1 expression (FIG. 16). As a control, cells transfected with pXIBM14 were negative for both IL-1β and c-Myc staining (A). As expected cells transfected with pTam29 were positive for c-Myc only (B). In contrast, cells co-transfected with: pXIBM32 and pTam29 (C); pXIBM34 and pTam29 (D); and pXIBM36 and pTam29 (E) were positive for both IL-1β binding and PDZ expression as measured by PE and Alexa647 fluorescence. In addition, the spacing between the C-terminus of XPA28IgG and NorpA tether did not seem to make a difference. These results successfully demonstrate that the NorpA tether display system is applicable to mammalian antibody display as well as yeast. In the absence of InaD PDZ1 expression, all three XPA28 IgG/NorpA tether proteins were secreted into the conditioned media and could be successfully purified using Protein A Sepharose indicating that the unpaired cysteine within the NorpA tether had no effect on the expression and folding of XPA28 IgG. Purification yields for the three fusion proteins were also comparable to XPA28 IgG without the NorpA tether. Reducing SDS-PAGE analysis of XPA28 IgG with and without the NorpA tether and GGGGS spacer confirmed of purity of the isolated proteins and presence of the NorpA tether fused to the heavy chain (FIG. 17).

### Example 6

### Testing the Importance of the InaD PDZ1/NorpA Disulfide Bond for Antibody Tethering

[0230] The crystal structure of the InaD PDZ1 domain (11-107) in complex with the C-terminal seven residues (1089-1095) of NorpA shows a disulfide bond between C31 and C1094 of InaD PDZ1 and NorpA, respectively (Kimple et al. 2001 EMBO J. 20:4414-4422). To investigate the importance of the disulfide bond in the tether display system, we constructed vectors pTam 49-52 by QuikChange™ mutagenesis using pTam37 as the template plasmid and the mutagenic primers outlined below:

pTam49 - Tam190
(SEQ ID NO: 81)
(GCCGGCAAGACCGAGTTCTCCGCCTGATGAGTTTAAACC)
and
Tam191
(SEQ ID NO: 82)
(GGTTTAAACTCATCAGGCGGAGAACTCGGTCTTGCCGGC).
pTam50 - Tam192
(SEQ ID NO: 83)
(CAAGAAGTCCTTCGGCATCTCCATAGTGCGCGGCGAGGTG)
and
Tam193
(SEQ ID NO: 84)
(CACCTCGCCGCGCACTATGGAGATGCCGAAGGACTTCTTG).
pTam51 - Tam220
(SEQ ID NO: 85)
(GTTATTGCCAGCGTTTTAGCATGATGAGCGGGTGAGCTCATTCAC)
and
Tam221
(SEQ ID NO: 86)
(GTGAATGAGCTCACCCGCTCATCATGCTAAAACGCTGGCAATAAC).
pTam52 - Tam222
(SEQ ID NO: 87)
(GTTATTGCCAGCGTTTTAGCATGATGACAGGTCCAGCTGGTGCAG)
and
Tam223
(SEQ ID NO: 88)
(CTGCACCAGCTGGACCTGTCATCATGCTAAAACGCTGGCAATAAC).

[0231] In pTam49, the penultimate cysteine residue (C1094) of the NorpA tether was mutated to a serine while the corresponding mutation (C31S) was made in the InaD PDZ1 domain resulting in pTam50 (FIG. 18). Both pTam51 and 52 contain two stop codons inserted immediately prior to the first codon of InaD PDZ1 and XPA28 scFv, respectively (FIG. 18).

[0232] BJ5465 cells were transformed with pTam37, 49, 50, 51 and 52, and grown in SDCAA containing 40 μg/ml tryptophan prior to galactose induction. Cells were then analyzed for IL-1β binding as well as for the presence of c-Myc and HA epitope tags using flow cytometry. As shown in FIG. 19A, cells transformed with pTam37 bind IL-1β whereas cells transformed with the NorpA C1094S mutant (pTam49) do not (FIG. 19B). Interestingly, the InaD PDZ1 C31S mutant (pTam50) retains IL-1β binding, albeit at level lower than pTam37 (FIG. 19C). Thus, the data demonstrate the importance of the disulfide bond between C31 and C1094 of InaD PDZ1 and NorpA, respectively. In all three vectors, the presence of PDZ on the cell surface was observed by Alexa Flour® 488 fluorescence. Finally, IL-1β binding was absent in cells that lack InaD PDZ1 (pTam51) or XPA28 scFv (pTam52) (FIGS. 19D and E), indicating that there were no non-specific interactions between IL-10 and InaD PDZ1 or the cell surface.

### Example 7

### Construction of an Antibody Tether Display Library

[0233] The acceptor vector pTam48 was created by replacing XPA28 in pTam37 with a 1.5 kilobase stuffer DNA fragment. This vector was then digested with NheI and SfiI to remove the stuffer DNA and gel purified. Insert DNA corresponding to the scFv library was generated as follows: VH and Vλ regions were PCR amplified from cDNA isolated from bone marrow, PBMCs, or spleens of thirty healthy donors using primers designed from V-Base. Each family of VH (1-7) and VL (1-10) were individually amplified using forward primers that anneal to the V segment and reverse primers annealing in the VJ and CH1 region for VH and VL respectively. Secondary PCR reactions were performed in order to add a NheI restriction site to the 5′ end of VH and a SfiI restriction site to the 3′ end of the VL region. Additionally, the reverse secondary primer for VH and forward secondary primer for VL are complementary and encode for the glycine-serine linker. PCR products for VH were pooled based on subfamily (VH1-7) while a single pool was created for VL (VL total). DNA from VH1-7 and VL total were mixed at a 5:1 ratio and a single combined fragment corresponding to the scFv was generated by overlap extension PCR using the following assembly primers (yAFor: TAAGATGCAGTTACTTCGCTGTTTTTCAATATTTTCTGTTATTGCTAGCGTTTTAG C (SEQ ID NO: 89) and yARev: ATGATGTGCGGCCCCTCCCAGATCTTCTTCTGAGATGAGTTTTTGTTCCAGGCCCC CGAGGC (SEQ ID NO: 90)). Both assembly primers contain 48 complementary base pairs of homology to the linearized acceptor vector pTam48. The seven assembly PCR products (VH1-7/VL pool) were combined into a single pool according to the natural distribution as described in V-Base (MRC Centre for Protein Engineering, Cambridge, UK). Vector and insert DNA were combined by homologous recombination. Linearized vector (8 μg) and scFv DNA (24 μg) were electroporated into BJ5465 cells resulting in a library size of 1.74×10⁸ transformants.

### Example 8

### Isolation of Anti-Transferrin scFvs from an Antibody Tether Display Library

[0234] For the first round of panning, 1×10¹⁰ cells from the library described in example 7 were incubated with 1 μM of biotin-labeled transferrin in FACS buffer (PBS containing 0.1% BSA) for 1 hour at room temperature. The cells were washed and incubated with streptavidin magnetic micro beads (Miltenyi Biotec, Cologne, Germany) for 10 minutes on ice. The cell suspension was then added to a LS column (Miltenyi Biotec), washed with FACS buffer, and eluted into SDCAA media containing 40 μg/ml tryptophan, and grown for 16-24 hours. Subsequently, cells were then passaged and grown an additional 24 hours. In preparation for FACS, cells were then transferred into SGCAA media containing 40 μg/ml tryptophan and grown 20-24 hours. For the second round of panning, cells were incubated with anti-c-Myc (4 μg/ml) in addition to biotinylated transferrin for 1 hour at room temperature. Cells were then washed with cold FACS buffer and incubated with streptavidin-phycoerythrin (PE) (10 μg/ml), anti-chicken Alexa Fluor® 647 conjugate (20 μg/ml) and anti-hemagglutinin (HA) Alexa Fluor® 488 conjugate (10 μg/ml) for 30 minutes at 4° C. and protected from light. Labeled cells were sorted using a FACSAria™ instrument (BD, Franklin Lakes, N.J.). As shown in FIG. 20A, sort gates corresponding to 4.0% of the population were used isolate clones that were positive for both PE and Alexa Fluor® 488 fluorescence. Sorted cells were collected in SDCAA containing 40 μg/ml tryptophan and grown at 30° C. for the next round of panning. In subsequent panning rounds, the location of the sort gate was altered in order to isolate clones of greater fluorescence (FIG. 20 B-D). After four rounds of enrichment by FACS, single clones were isolated by plating and used to inoculate a single 96-well plate of media. Transferrin binding by the individual scFv clones was assessed by flow cytometry. Subsequently, 18 unique sequences were identified and further characterized using antigen titration curves. Cells were then incubated with increasing concentrations of biotin labeled transferrin (1 nM-2 μM) and analyzed by flow cytometry. The mean PE fluorescence (percentage of total) was plotted against antigen concentration and the dissociation constant (K_{D}) was determined as the concentration at the half maximum (EC₅₀). Estimated affinities for three exemplary clones are shown in FIG. 21.

### Example 9

### Display of IgG and Fab on Yeast Cell Surface

[0235] In order to display the antibody XPA28 IgG on the surface of yeast cells, the vector pTam48 (see Example 7) was first modified by QuikChange™ mutagenesis to silence the second PmeI site (FIG. 22), using primers Tam147 (CTAGGATCAGCGGGTTTAGACTTAACTGAAAATTACATTGC) (SEQ ID NO: 535 and Tam148 (GCCCTCTAGGATCAGCGGGAATTCTTAACTGAAAATTACATT) (SEQ ID NO: 536). The resulting vector was digested with NheI and PmeI to remove stuffer sequence, cMyc and His₆ epitope tags, and the NorpA tether. The resulting 8 kb fragment was then ligated to a 3 kb overlap extension PCR fragment that had been digested with NheI-HF and PmeI. The latter fragment was comprised of the following three PCR amplifications:
[0236] (1) the light chain from the vector pXIBM36 (see FIG. 15A), amplified with primers CAATATTTTCTGTTATTGCTAGCGTTTTAGCACAGGCTGTGCTGACTCAG C (SEQ ID NO: 537) and AGTCGATTTTGTTACATCCTATGAACATTCTGTAGGGGCCAC (SEQ ID NO: 538);
[0237] (2) the MATα terminator, Gal1 promoter, and Aga2 signal sequence from the vector pTam48, amplified with primers GATGTAACAAAATCGACTTTGTTCC (SEQ ID NO: 540) and GACTGCACCAGCTGGACCTGTGCTAAAACGCTGGCAATAAC (SEQ ID NO: 541);
[0238] (3) the V_{H} and C_{H1-3} region from the vector pXIBM36, amplified with primers CAGGTCCAGCTGGTGCAGTC (SEQ ID NO: 542) and TCAGATCAGCGGGTTTAAACTCAGGCGCAGAACTCGGTCTTG (SEQ ID NO: 543).

[0239] For cloning purposes, a NcoI site in the URA3 gene was silenced by QuikChange™ mutagenesis and primers CTTAACTGTGCCCTCCATCGAAAAATCAGTCAAGATATC (SEQ ID NO: 544) and GATATCTTGACTGATTTTTCGATGGAGGGCACAGTTAAG (SEQ ID NO: 545). The final vector, pVV42 is shown in FIG. 23.

[0240] The sequence coding for the Fc region in the IgG vector pVV42 (FIG. 24) was removed by amplifying the V_{H} and C_{H}1 domains from vector pVV42 with primers oVV82PCR (CAAGCCATGGCTCAGGTCCA) (SEQ ID NO: 546) and oVV82PCRreverse (GGGTTTAAACTCAGGCGCAGAACTCGGTCTTGCCTGAACCGCCGCCTCCACAAG ATTTGGGCTCAACTCTCT (SEQ ID NO: 547), where the reverse complement of the underlined sequence codes for the NorpA tether amino acids GKTEFCA (SEQ ID NO: 16)). The PCR fragment was then digested with NcoI and PmeI and ligated into pVV42, which had been previously digested with NcoI and PmeI, resulting in a new vector, pVV47 (FIG. 24).

[0241] BJ5465 yeast cells were transformed with the following vectors: pTam37 (XPA28 scFv), pVV47 (XPA28 Fab), and pVV42 (XPA28 IgG1), grown on SDCAA containing 40 μg/ml tryptophan, and induced with galactose. For flow cytometry analysis, cells were washed with wash buffer, then incubated with biotin labeled IL-1β (100 nM) for 1 hour at room temperature. The cells were then washed and incubated with streptavidin-phycoerythrin (PE) (10 μg/ml) and anti-hemagglutinin (HA) Alexa Fluor® 488 conjugate (10 μg/ml) for 30 minutes on ice and protected from light. The cells were then washed one final time before being analyzed. Shown in FIG. 25 is the bivariate plot of PE and Alexa Fluor 488 fluorescence, indicating the presence of biotin-IL-1β and the InaD PDZ1/Aga1 fusion on the yeast cell surface, respectively. These results indicate that all three constructs produced displayed proteins that bound IL-1β. Cells displaying the scFv format exhibited the highest level of antigen binding among the three formats, followed by Fab, then IgG (FIG. 25). The level of PDZ/Aga1 display appears to be independent of antibody size and was similar for all three constructs. This experiment demonstrates that multiple antibody types can be displayed on the yeast cell surface using the disclosed PDZ tether display system.

### Example 10

### Identification and Characterization of Tie2 Binding Antibodies Using Integrated Phage, Yeast, and Mammalian Display

### Construction Of XFab 1 Library

[0242] The XFab1 phage library was prepared as follows: cDNA was prepared from 30 donors (AllCells, Emeryville, USA) by RT-PCR using standard methods (Sambrook et al., Molecular Cloning: A Laboratory Guide, Vols 1-3, Cold Spring Harbor Press (1989)). The VL and VH regions were PCR amplified using cDNA templates and primers based on the germ-line sequences from V BASE (MRC Centre for Protein Engineering, Cambridge, UK). Amplified VH and VL fragments were then ligated into pXHMV-US2-L-Fab or pXHMV-US2-K-Fab vector sequentially. Ligated DNA was electroporated into electrocompetent TG1 cells (Lucigen, Middleton, USA). The size of the XFab1 library obtained was 2.5×10¹¹ transformants.

### Phage Panning Against Tie2 Antigen

[0243] In preparation for phage panning, streptavidin-coupled Dynabeads® (Life Technologies, Carlsbad, Calif.) were washed 3× with PBS containing 5% milk. The beads and phage (100× library equivalent) were then blocked with PBS containing 5% milk for 1 hour at room temperature. A deselection step was performed by incubating the blocked phage with 100 μl of blocked beads for 30 minutes at room temperature. This step was repeated again. The antigen Tie2 (R&D System, Minneapolis, Minn.) was labeled with Sulfo-NHS-LC Biotin (Thermo Scientific, Rockford, Ill.). For the first round of panning, 100 pmoles of antigen was incubated with 100 μl of blocked beads for 30 minutes. Following washing, the Tie2 bound beads were incubated with the deselected library phage for 1 hour at room temperature. The beads were then washed 3× using PBS containing 0.05% Tween® 20 and 5% milk. Bound phage were eluted by suspending the washed beads in 500 μl of 100 mM TEA (EMD Chemicals, Gibbstown, N.J.) for 20 minutes and then neutralized with an equal volume of 1M Tris (pH 7.4) (Teknova, Hollister, Calif.). The phage/bead solution was then used to infect log phase TG1 E. coli (10 ml) cells for 1 hour at 37° C. with 100 rpm shaking. Infected cells were plated on 2YTCG media (2YT containing 100 g/ml carbenicillin and 2% glucose) and incubated at 30° C. overnight. The following day, the cells were collected by scraping and used to inoculate fresh liquid 2YTCG media.

[0244] Cells numbering 100× of the output phage from the previous round were used to inoculate a culture of 2YTCG cells for final optical density at 600 nm (OD₆₀₀) of 0.05. The culture was then grown at 37° C. with shaking (250 rpm) until an OD600 of 0.5 was reached. M13K07 helper phage (New England Biolabs, Ipswich, Mass.) was added to the culture at a multiplicity of infection (MOI) of 20. The culture was further incubated at 37° C. for 1 hour with shaking (100 rpm). Infected cells were then pelleted and resuspended in 2YT medium with 100 μg/ml carbenicillin and 50 μg/ml of kanamycin and grown overnight at 30° C. with shaking (250 rpm). The following day, the cells were pelleted and the phage supernatant was set aside. For the second round of panning, 1 ml of phage supernatant and 50 pmoles of biotin-labeled Tie2 were used. In the third round, 100 μl of phage supernatant was used while the amount of antigen remained unchanged (50 pmoles). All other panning conditions were similar to Round 1.

### Transfer of Enriched Phage Clones to Mammalian Display Vector

[0245] Infected cells from the third round of panning were grown on 2YTCG media overnight at 30° C. as before. The following day, cells were scraped and plasmid DNA was isolated using a Plasmid Mega kit (Qiagen, Valencia, Calif.). Plasmid DNA (30 μg) was digested with SfiI and NheI in order to excise a single insert containing the VL, CL and VH regions. The acceptor vector, pXIBM36 was also digested with the same restriction enzymes. Both insert and cut vector were gel purified using a QIAquick® gel extraction kit (Qiagen, Valencia, Calif.). One microgram of DNA total consisting of a vector-to-insert ratio of 2:1 was incubated overnight at 16° C. with T4 DNA ligase. One microliter of the ligation reaction was used to electroporate TOP10 E. coli (Life Technologies, Carlsbad, Calif.). After plating and overnight growth, colonies representing 10× of the third round phage output were scraped and plasmid DNA was isolated as before. DNA was then digested with AvrII and NcoI to remove a fragment containing an E. coli optimized CL and the pelB signal sequence preceding the VH region. This was replaced with a fragment containing a human CL, IRES2 and an IgG leader sequence by ligation and electroporating TOP10 cells as before. Again following plating and overnight growth, colonies representing 10× of the third round phage output were scraped and processed for DNA. The purified plasmid DNA now contained the phage-derived VL and VH regions transferred into an IgG1 backbone.

### Identification of Anti-Tie2 IgGs Using Mammalian Display

[0246] HEK293E cells were transfected as described in Example 1 using a 1:1 ratio of plasmid DNA encoding IgG and pTam29 for a total of 20 μg. Following a 24 hour transfection, cells were incubated with biotin-Tie2 at a final concentration of 5 μg/ml and chicken anti c-Myc (4 μg/ml) (Life Technologies, Carlsbad, Calif.) for 1 hour at 4° C. Subsequent labeling and flow cytometry analysis was performed as described in Example 1. As shown in FIG. 26A, the majority of the cells analyzed were positive for both Tie2 binding and PDZ display confirming that both the transfection and the 2-step cloning of VL and VH from phage vector into the mammalian display vector, were successful. Next, the transfected cells were subjected to another round of enrichment using magnetic cell separation (MACS). Briefly, cells (2×10⁷) were washed with PBS containing 0.5% FBS and 2 mM EDTA and incubated with 10 pmoles of biotin labeled Tie2 for 30 minutes at 4° C. The cells were washed again and incubated with 40 μl of anti-biotin microbeads (Miltenyi Biotec, Auburn, Calif.) for 15 minutes at 4° C. Cells were washed again and resuspended in PBS containing 0.5% FBS and 2 mM EDTA for a final volume of 500 μl. The cell suspension was then filtered using a 70 μm nylon mesh prior to loading onto a LS column (Miltenyi Biotech, Auburn, Calif.). Tie2-binding cells were isolated using a MidiMacs™ separator (Miltenyi Biotech, Auburn, Calif.) according to the manufacturer's instructions. Analysis of the eluted cells by flow cytometry revealed that the additional round of panning by MACS further enriched the percentage of Tie2-binding cells in the population by 20% (FIG. 26B) as compared to the previous panning round (FIG. 26A).

[0247] Plasmid DNA was isolated from the eluted cells using a Mini-prep kit (Qiagen, Valencia, Calif.), electroporated into TOP10 E. coli cells, and grown overnight at 37° C. on LB media containing 100 μg/ml carbenicillin. The following day, colonies were picked for sequence analysis, of which 34 were unique clones. In order to produce soluble IgG for further characterization, the following modifications were made to the transfection protocol described in Example 1.

[0248] Ten microliters of IgG miniprep DNA was incubated with 1 μg of Lipofectamine™ for 20 minutes at room temperature. The mixture was then added to 100 μl of HEK293E cells seeded in a 96-well culture plate. Following 48 hours of growth at 37° C. with 5% CO₂, the cell media was collected.

[0249] IgG clones were then screened for binding to Tie2 expressed on CHOK1 cells. To accomplish this, 25 μl of cell media containing secreted IgG supernatant was incubated with 25 μl of CHOK1-Tie2 cells (2×10⁶ cells/ml) for 30 minutes at 4° C. Prior to this, the CHOK1-Tie2 cells had been pre-labeled with CSFE dye (Life Technologies, Carlsbad, Calif.) to allow their discrimination by flow cytometry. The cells were then washed with FACS buffer (PBS containing 0.5% BSA and 0.01% sodium azide) and incubated with 25 μl of mouse anti c-Myc (400 ng/ml) (Roche Applied Science, Indianapolis, Ind.) in FACS buffer for minutes. The cell pellet was washed again and incubated with 25 μl of a 1:200 dilution of allophycocyanin (APC)-conjugated goat anti-mouse IgG (Jackson Immuno Labs, West Grove, Pa.) in FACS buffer for 15 minutes at 4° C. After labeling, the cells were resuspended in 50 μl of a 1:1 mixture of FACS buffer and 4% paraformaldehyde (Sigma Aldrich, St. Louis, Mo.) before flow cytometric analysis.

### Affinity Determination and Functional Characterization of Anti-Tie2 IgGs

[0250] Based on the CHO-Tie2 binding screen, the top ten IgG clones were propagated into 24-well culture plates and grown for an additional 3 days to produce IgG for affinity determination. Media containing secreted IgGs were first diluted to ˜2 μg/ml (total protein) with assay buffer (10 mM HEPES, 150 mM NaCl, 3 mM EDTA, 0.05% Surfactant P20, 1 mg/ml BSA, pH 7.4) and injected onto anti-human IgG (Jackson ImmunoResearch, West Grove, Pa.)-coupled biosensors using a Biacore A100 (GE Healthcare, Waukesha, Wis.). Six concentrations of Tie2 in serial three-fold dilutions (10 nM-0.04 nM) were then injected over the captured IgG in duplicate. Injections of Tie2 were 4 minutes at 30 μl/minute while the dissociation time was 10 minutes. Collected data was fit to a 1:1 Langmuir interaction model using Biacore A100 evaluation software (GE Healthcare, Waukesha, Wis.). Dissociation constants were calculated for six out of the ten IgG clones (FIG. 27) Impressively, all 6 IgGs displayed single to double digit nanomolar affinity for soluble Tie2.

[0251] In addition to Biacore, a functional assay was also performed on the top ten clones from the binding screen. Serum starved CHOK1-Tie2 cells were incubated with the Tie2 ligand, Ang1 (10 μg/ml), or anti-Tie2 IgGs (10 and 50 μg/ml) for 10 minutes at 37° C. Cellular Akt phosphorylation at serine 473 was then determined using Phospho-Akt kit (Meso Scale Discovery, Gaithersburg, Md.). As shown in FIG. 27, nine out of ten clones that bind Tie2 were found to activate Tie2 signaling. Phospho-Akt levels were observed to be 40-60% of those seen with Ang1. Negligible phosphorylation was observed for the negative controls: anti-KLH treated and untreated cells.

### Transfer of Enriched Phage Clones to Yeast Display Vector

[0252] Tie2 round 3 output from lambda Fab phage display library XFab1, consisting of 10⁵-10⁶ cfu, was cloned into the yeast display vector pVV42 (FIG. 23). In the first step, the SfiI/NheI fragment from the output was bulk-transferred by ligation (1:2 molar ratio of vector:insert) into similarly digested pVV42. Electroporation of 3 ul ligation (165 ng vector) into 40 ul XL1-Blue E. coli cells (Agilent, Santa Clara, Calif.) yielded ˜4×10⁹ transformants. In the second step of cloning, yeast sequences replaced the bacterial sequences between the variable domains; specifically, AvrII/NcoI fragment from pVV42 (consisting of CL-MATalpha terminator-Gal1 promoter-US2 signal sequence) was ligated 1:6 vector:insert into the similarly-digested library constructed in step one. Electroporation of 2.5 ul ligation (91 ng vector) into 50 ul TOP10 E. coli cells (Invitrogen, Carlsbad, Calif.) in each of 22 transformations yielded ˜4000 colonies.

[0253] Yeast were electroporated with the DNA isolated from these bacterial colonies. Yeast strain BJ5465 was made electrocompetent and transformed as described in Benatuil et al, Protein Engineering, Design & Selection 23, 155-9 (2010). DNA was concentrated with Pellet Paint®co-precipitant (EMD Chemicals, Darmstadt, Germany) and 2.5 μg electroporated in ˜3.2×10⁹ yeast cells, yielding ˜2×10⁵ yeast colony-forming units.

[0254] Yeast FACS, screening, and sequencing: Expression from library-transformed yeast was induced (after 48 hours in SDCAA+40 μg/ml tryptophan) by incubation for 26 hours in SGCAA+40 μg/ml tryptophan+galactose. Binding to antigen was detected by incubating yeast for one hour with ˜400 ng/ml biotinylated Tie2-Fc and then fluorescent PE-tagged streptavidin, as well as an antibody detector: 10 μg/mL fluorescent APC-tagged anti-lambda IgG (Brookwood Biomedical, Birmingham, Ala.). Labeled cells were sorted using a FACSAria™ instrument (BD, Franklin Lakes, N.J.). As shown in FIG. 28, three populations of Tie2-binding and antibody-displaying double positive cells were collected. Of 94 colonies then induced, all were verified as binding Tie2 by flow cytometry. Of 58 clones sequenced, 20 were unique, representing a diversity of families of heavy chain and light chain complementarity-determining regions.

### Analysis of Unique Clones Discovered by Using the Integrated Display Platforms

[0255] The sequences of the unique Fab clones that were discovered using only yeast display were compared with the unique Fab clones that were recovered using yeast or mammalian display. For each display platform, the majority of the clones were not recovered using the other display technologies (Table 3—the percentage of clones from each selection also seen using other selection methods is shown in unshaded boxes and the percentage of clones unique to one selection method is shown in the shaded boxes). Therefore, using an integrated display method allowed additional diverse clones to be discovered that were not accessible using a single platform.

TABLE 3

[chemical structure]

The application's sequence listing, which the Patent Office published only in electronic form, follows.

SEQUENCE LISTING (548 sequences)

SEQ ID NO: 1 - protein, 1095 aa, Drosophila melanogaster
  ref <308>: DATABASE ACCESSION NUMBER: GenBank / AA28724
  ref <309>: DATABASE ENTRY DATE: 1993-04-26
  ref <313>: RELEVANT RESIDUES IN SEQ ID NO: (1)..(1095)
MTKKYEFDWIIPVPPELTTGCVFDRWFENEKETKENDFERDALFKVDEYGFFLYWKSEGRDGDVIELCQVSDIRAGGTPKDPKILDKVTKKNGTNIPELDKRSLTICSNTDYINITYHHVICPDAATAKSWQKNLRLITHNNRATNVCPRVNLMKHWMRLSYCVEKSGKIPVKTLAKTFASGKTEKLVYTCIKDAGLPDDKNATMTKEQFTFDKFYALYHKVCPRNDIEELFTSITKGKQDFISLEQFIQFMNDKQRDPRMNEILYPLYEEKRCTEIINDYELDEEKKKNVQMSLDGFKRYLMSDENAPVFLDRLDFYMEMDQPLAHYYINSSHNTYLSGRQIGGKSSVEMYRQTLLAGCRCVELDCWNGKGEDEEPIVTHGHAYCTEILFKDCIQAIADCAFVSSEYPVILSFENHCNRAQQYKLAKYCDDFFGDLLLKEPLPDRPLDPGLPLPPPCKLKRKILIKNKRMKPEVEKVELELWLKGELKTDDDPEEDASAGKPPEAAAAPAPAPEAAAAAEGAAEGGGGAEAEAAAANYSGSTTNVHPWLSSMVNYAQPIKFQGFDKAIEKNIAHNMSSFAESAGMNYLKQSSIDFVNYNKRQMSRIYPKGTRADSSNYMPQVFWNAGCQMVSLNFQSSDLPMQLNQGKFEYNGGCGYLLKPDFMRRADKDFDPFADAPVDGVIAAQCSVKVIAGQFLSDKKVGTYVEVDMFGLPSDTVKKEFRTRLVANNGLNPVYNEDPFVFRKVVLPDLAVLRFGVYEESGKILGQRILPLDGLQAGYRHVSLRTEANFPMSLPMLFVNIELKIYVPDGFEDFMAMLSDPRGFAGAAKQQNEQMKALGIEEQSGGAARDAGKAKEEEKKEPPLVFEPVTLESLRQEKGFQKVGKKQIKELDTLRKKHAKERTSVQKTQNAAIDKLIKGKSKDDIRNDANIKNSINDQTKQWTDMIARHRKEEWDMLRQHVQDSQDAMKALMLTVQAAQIKQLEDRHARDIKDLNAKQAKMSADTAKEVQNDKTLKTKNEKDRRLREKRQNNVKRFMEEKKQIGVKQGRAMEKLKLAHSKQIEEFSTDVQKLMDMYKIEEEAYKTQGKTEFCA

SEQ ID NO: 2 - protein, 674 aa, Drosophila melanogaster
  ref <308>: DATABASE ACCESSION NUMBER: Swiss-Prot / Q24008
  ref <309>: DATABASE ENTRY DATE: 2010-11-30
  ref <313>: RELEVANT RESIDUES IN SEQ ID NO: (1)..(674)
MVQFLGKQGTAGELIHMVTLDKTGKKSFGICIVRGEVKDSPNTKTTGIFIKGIVPDSPAHLCGRLKVGDRILSLNGKDVRNSTEQAVIDLIKEADFKIELEIQTFDKSDEQQAKSDPRSNGYMQAKNKFNQEQTTNNNASGGQGMGQGQGQGQGMAGMNRQQSMQKRNTTFTASMRQKHSNYADEDDEDTRDMTGRIRTEAGYEIDRASAGNCKLNKQEKDRDKEQEDEFGYTMAKINKRYNMMKDLRRIEVQRDASKPLGLALAGHKDRQKMACFVAGVDPNGALGSVDIKPGDEIVEVNGNVLKNRCHLNASAVFKNVDGDKLVMITSRRKPNDEGMCVKPIKKFPTASDETKFIFDQFPKARTVQVRKEGFLGIMVIYGKHAEVGSGIFISDLREGSNAELAGVKVGDMLLAVNQDVTLESNYDDATGLLKRAEGVVTMILLTLKSEEAIKAEKAAEEKKKEEAKKEEEKPQEPATAEIKPNKKILIELKVEKKPMGVIVCGGKNNHVTTGCVITHVYPEGQVAADKRLKIFDHICDINGTPIHVGSMTTLKVHQLFHTTYEKAVTLTVFRADPPELEKFNVDLMKKAGKELGLSLSPNEIGCTIADLIQGQYPEIDSKLQRGDIITKFNGDALEGLPFQVCYALFKGANGKVSMEVTRPKPTLRTEAPKA

SEQ ID NO: 3 - protein, 670 aa, Drosophila melanogaster
  ref <308>: DATABASE ACCESSION NUMBER: Swiss-Prot / P54792
  ref <309>: DATABASE ENTRY DATE: 2010-11-30
  ref <313>: RELEVANT RESIDUES IN SEQ ID NO: (1)..(670)
MAETKIIYHMDEEETPYLVKLPVAPERVTLADFKNVLSNRPVHAYKFFFKSMDQDFGVVKEEIFDDNAKLPCFNGRVVSWLVLVEGAHSDAGSQGTDSHTDLPPPLERTGGIGDSRSPSFQPDVASSRDGMDNETGTESMVSHRRDRARRRNREEAARTNGHPRGDRRRDVGLPPDSASTALSSELESSSFVDSDEDDSTSRLSSSTEQSTSSRLIRKHKRRRRKQRLRQADRASSFSSMTDSTMSLNIITVTLNMERHHFLGICIVGQSNDRGDGGIYIGSIMKGGAVAADGRIEPGDMLLQVNDVNFENMSNDDAVRVLREIVSQTGPISLTVAKCWDPTPRSYFTVPRPDPVRPIDPAAWLSHTAALTGALPRPQLEEAPLTVESDMNTVVRVMQLPDSGLEIRDRMWLKITIANAVIGADVVDWLYTHVEGFKERREARKYASSLLKHGFLRHTVNKITFSEQCYYVFGDLCSNLATLNLNSGSSGTSDQDTLAPLPHPAAPWPLGQGYPYQYPGPPPCFPPAYQDPGFSYGSGSTGSQQSEGSKSSGSTRNTLRPPACEKERRAAGSGDSDSESDHTAPSGVGSSWRERPADQLSRGSSPRSQASSYAPGLPPPHPTTKAYTVVGGPPGGPPVRELAAVPPELTGSRQSFQKAMGNPCEFFVDIM

SEQ ID NO: 4 - protein, 298 aa, Homo sapiens
  ref <308>: DATABASE ACCESSION NUMBER: Swiss-Prot / O00560
  ref <309>: DATABASE ENTRY DATE: 2010-11-30
  ref <313>: RELEVANT RESIDUES IN SEQ ID NO: (1)..(298)
MSLYPSLEDLKVDKVIQAQTAFSANPANPAILSEASAPIPHDGNLYPRLYPELSQYMGLSLNEEEIRANVAVVSGAPLQGQLVARPSSINYMVAPVTGNDVGIRRAEIKQGIREVILCKDQDGKIGLRLKSIDNGIFVQLVQANSPASLVGLRFGDQVLQINGENCAGWSSDKAHKVLKQAFGEKITMTIRDRPFERTITMHKDSTGHVGFIFKNGKITSIVKDSSAARNGLLTEHNICEINGQNVIGLKDSQIADILSTSGTVVTITIMPAFIFEHIIKRMAPSIMKSLMDHTIPEV

SEQ ID NO: 5 - protein, 292 aa, Homo sapiens
  ref <308>: DATABASE ACCESSION NUMBER: NCBI / NP_001186713
  ref <309>: DATABASE ENTRY DATE: 2010-12-17
  ref <313>: RELEVANT RESIDUES IN SEQ ID NO: (1)..(292)
MSSLYPSLEDLKVDQAIQAQVRASPKMPALPVQATAISPPPVLYPNLAELENYMGLSLSSQEVQESLLQIPEGDSTAVSGPGPGQMVAPVTGYSLGVRRAEIKPGVREIHLCKDERGKTGLRLRKVDQGLFVQLVQANTPASLVGLRFGDQLLQIDGRDCAGWSSHKAHQVVKKASGDKIVVVVRDRPFQRTVTMHKDSMGHVGFVIKKGKIVSLVKGSSAARNGLLTNHYVCEVDGQNVIGLKDKKIMEILATAGNVVTLTIIPSVIYEHMVKKLPPVLLHHTMDHSIPDA

SEQ ID NO: 6 - protein, 852 aa, Rattus norvegicus
  ref <308>: DATABASE ACCESSION NUMBER: GenBank / AAB48562
  ref <309>: DATABASE ENTRY DATE: 2000-09-27
  ref <313>: RELEVANT RESIDUES IN SEQ ID NO: (1)..(852)
MFFACYCALRTNVKKYRYQDEDGPHDHSLPRLTHEVRGPELVHVSEKNLSQIENVHGYVLQSHISPLKASPAPIIVNTDTLDTIPYVNGTEIEYEFEEITLERGNSGLGFSIAGGTDNPHIGDDPGIFITKIIPGGAAAEDGRLRVNDCILRVNEVDVSEVSHSKAVEALKEAGSIVRLYVRRRRPILETVVEIKLFKGPKGLGFSIAGGVGNQHIPGDNSIYVTKIIDGGAAQKDGRLQVGDRLLMVNNYSLEEVTHEEAVAILKNTSDVVYLKVGKPTTIYMTDPYGPPDITHSYSPPMENHLLSGNNGTLEYKTSLPPISPGRYSPIPKHMLVEDEYTRPPEPVYSTVNKLCDKPASPRHYSPVECDKSFLLSTPYPHYHLGLLPDSDMTSHSQHSTATRQPSVTLQRAISLEGEPRKVVLHKGSTGLGFNIVGGEDGEGIFVSFILAGGPADLSGELQRGDQILSVNGIDLRGASHEQAAAALKGAGQTVTIIAQYQPEDYARFEAKIHDLREQMMNHSMSSGSGSLRTNQKRSLYVRAMFDYDKSKDSGLPSQGLSFKYGDILHVINASDDEWWQARRVILDGDSEEMGVIPSKRRVERKERARLKTVKFNAKPGVIDSKGDIPGLGDDGYGTATLRGQEDLILSYEPVTRQEINYTRPVIILGPMKDRINDDLISEFPDKFGSCVPHTTRPKRDYEVDGRDYHFVISREQMEKDIQEHKFIEAGQYNDNLYGTSVQSVRFVAERGKHCILDVSGNAIKRLQVAQLYPIAIFIKPKSLEPLMEMNKRLTEEQAKKTYDRAIKLEQEFGEYFTAIVQGDTLEDIYNQCKLVIEEQSGPFIWIPSKEKL

SEQ ID NO: 7 - protein, 1412 aa, Homo sapiens
  ref <308>: DATABASE ACCESSION NUMBER: Swiss-Prot / Q95RT1
  ref <309>: DATABASE ENTRY DATE: 2010-11-30
  ref <313>: RELEVANT RESIDUES IN SEQ ID NO: (1)..(1412)
MTTKRSLFVRLVPCRCLRGEEETVTTLDYSHCSLEQVPKEIFTFEKTLEELYLDANQIEELPKQLFNCQSLHKLSLPDNDLTTLPASIANLINLRELDVSKNGIQEFPENIKNCKVLTIVEASVNPISKLPDGFSQLLNLTQLYLNDAFLEFLPANFGRLTKLQILELRENQLKMLPKTMNRLTQLERLDLGSNEFTEVPEVLEQLSGLKEFWMDANRLTFIPGFIGSLKQLTYLDVSKNNIEMVEEGISTCENLQDLLLSSNSLQQLPETIGSLKNITTLKIDENQLMYLPDSIGGLISVEELDCSFNEVEALPSSIGQLTNLRTFAADHNYLQQLPPEIGSWKNITVLFLHSNKLETLPEEMGDMQKLKVINLSDNRLKNLPFSFTKLQQLTAMWLSDNQSKPLIPLQKETDSETQKMVLTNYMFPQQPRTEDVMFISDNESFNPSLWEEQRKQRAQVAFECDEDKDEREAPPREGNLKRYPTPYPDELKNMVKTVQTIVHRLKDEETNEDSGRDLKPHEDQQDINKDVGVKTSESTTTVKSKVDEREKYMIGNSVQKISEPEAEISPGSLPVTANMKASENLKHIVNHDDVFEESEELSSDEEMKMAEMRPPLIETSINQPKVVALSNNKKDDTKETDSLSDEVTHNSNQNNSNCSSPSRMSDSVSLNTDSSQDTSLCSPVKQTHIDINSKIRQEDENFNSLLQNGDILNSSTEEKFKAHDKKDFNLPEYDLNVEERLVLIEKSVDSTATADDTHKLDHINMNLNKLITNDTFQPEIMERSKTQDIVLGTSFLSINSKEETEHLENGNKYPNLESVNKVNGHSEETSQSPNRTEPHDSDCSVDLGISKSTEDLSPQKSGPVGSVVKSHSITNMEIGGLKIYDILSDNGPQQPSTTVKITSAVDGKNIVRSKSATLLYDQPLQVFTGSSSSSDLISGTKAIFKFDSNHNPEEPNIIRGPTSGPQSAPQIYGPPQYNIQYSSSAAVKDTLWHSKQNPQIDHASFPPQLLPRSESTENQSYAKHSANMNFSNHNNVRANTAYHLHQRLGPARHGEMWAISPNDRLIPAVTRSTIQRQSSVSSTASVNLGDPGSTRRAQIPEGDYLSYREFHSAGRTPPMMPGSQRPLSARTYSIDGPNASRPQSARPSINEIPERTMSVSDFNYSRTSPSKRPNARVGSEHSLLDPPGKSKVPRDWREQVLRHIEAKKLEKKHPQTSSSGDPCQDGIFISGQQNYSSATLSHKDVPPDSLMKMPLSNGQMGQPLRPQANYSQIHHPPQASVARHPSREQLIDYLMLKVAHQPPYTQPHCSPRQGHELAKQEIRVRVEKDPELGFSISGGVGGRGNPFRPDDDGIFVTRVQPEGPASKLLQPGDKIIQANGYSFINIEHGQAVSLLKTFQNTVELIIVREVSS

SEQ ID NO: 8 - protein, 725 aa, Saccharomyces cerevisiae
  ref <308>: DATABASE ACCESSION NUMBER: GenBank / CAA96325
  ref <309>: DATABASE ENTRY DATE: 1997-08-11
  ref <313>: RELEVANT RESIDUES IN SEQ ID NO: (1)..(725)
MTLSFAHFTYLFTILLGLTNIALASDPETILVTITKTNDANGVVTTTVSPALVSTSTIVQAGTTTLYTTWCPLTVSTSSAAEISPSISYATTLSRFSTLTLSTEVCSHEACPSSSTLPTTTLSVTSKFTSYICPTCHTTAISSLSEVGTTTVVSSSAIEPSSASIISPVTSTLSSTTSSNPTTTSLSSTSTSPSSTSTSPSSTSTSSSSTSTSSSSTSTSSSSTSTSPSSTSTSSSLTSTSSSSTSTSQSSTSTSSSSTSTSPSSTSTSSSSTSTSPSSKSTSASSTSTSSYSTSTSPSLTSSSPTLASTSPSSTSISSTFTDSTSSLGSSIASSSTSVSLYSPSTPVYSVPSTSSNVATPSMTSSTVETTVSSQSSSEYITKSSISTTIPSFSMSTYFTTVSGVTTMYTTWCPYSSESETSTLTSMHETVTTDATVCTHESCMPSQTTSLITSSIKMSTKNVATSVSTSTVESSYACSTCAETSHSYSSVQTASSSSVTQQTTSTKSWVSSMTTSDEDFNKHATGKYHVTSSGTSTISTSVSEATSTSSIDSESQEQSSHLLSTSVLSSSSLSATLSSDSTILLFSSVSSLSVEQSPVTTLQISSTSEILQPTSSTAIATISASTSSLSATSISTPSTSVESTIESSSLTPTVSSIFLSSSSAPSSLQTSVTTTEVSTTSISIQYQTSSMVTISQYMGSGSQTRLPLGKLVFAIMAVACNVIFS

SEQ ID NO: 9 - protein, 1099 aa, Mus musculus
  ref <308>: DATABASE ACCESSION NUMBER: NCBI / NP_00139740
  ref <309>: DATABASE ENTRY DATE: 2010-12-20
  ref <313>: RELEVANT RESIDUES IN SEQ ID NO: (1)..(1099)
MGLPGVIPALVLRGQLLLSVLWLLGPQTSRGLVITPPGPEFVLNISSTFVLTCSGSAPVMWEQMSQVPWQEAAMNQDGTFSSVLTLTNVTGGDTGEYFCVYNNSLGPELSERKRIYIFVPDPTMGFLPMDSEDLFIFVTDVTETTIPCRVTDPQLEVTLHEKKVDIPLHVPYDHQRGFTGTFEDKTYICKTTIGDREVDSDTYYVYSLQVSSINVSVNAVQTVVRQGESITIRCIVMGNDVVNFQWTYPRMKSGRLVEPVTDYLFGVPSRIGSILHIPTAELSDSGTYTCNVSVSVNDHGDEKAINISVIENGYVRLLETLGDVEIAELHRSRTLRVVFEAYPMPSVLWLKDNRTLGDSGAGELVLSTRNMSETRYVSELILVRVKVSEAGYYTMRAFHEDDEVQLSFKLQVNVPVRVLELSESHPANGEQTIRCRGRGMPQPNVTWSTCRDLKSRCPRKLSPTPLGNSSKEESQLETNVTFWEEDQEYEVVSTLRLRHVDQPLSVRCMLQNSMGGDSQEVTVVPHSLPFKVVVISAILALVVLTVISLIILIMLWQKKPRYEIRWKVIESVSSDGHEYIYVDPVQLPYDSTWELPRDQLVLGRTLGSGAFGQVVEATAHGLSHSQATMKVAVKMLKSTARSSEKQALMSELKIMSHLGPHLNVVNLLGACTKGGPIYIITEYCRYGDLVDYLHRNKHTFLQRHSNKHCPPSAELYSNALPVGFSLPSHLNLTGESDGGYMDMSKDESIDYVPMLDMKGDIKYADIESPSYMAPYDNYVPSAPERTYRATLINDSPVLSYTDLVGFSYQVANGMDFLASKNCVHRDLAARNVLICEGKLVKICDFGLARDIMRDSNYISKGSTFLPLKWMAPESIFNSLYTTLSDVWSFGILLWEIFTLGGTPYPELPMNDQFYNAIKRGYRMAQPAHASDEIYEIMQKCWEEKFETRPPFSQLVLLLERLLGEGYKKKYQQVDEEFLRSDHPAILRSQARFPGIHSLRSPLDTSSVLYTAVQPNESDNDYIIPLPDPKPDVADEGLPEGSPSLASSTLNEVNTSSTISCDSPLELQEEPQQAEPEAQLEQPQDSGCPGPLAEAEDSFL

SEQ ID NO: 10 - protein, 767 aa, Homo sapiens [sequence omitted]

SEQ ID NO: 11 - protein, 960 aa, Drosophila melanogaster
  ref <308>: DATABASE ACCESSION NUMBER: GenBank / AAA28468
  ref <309>: DATABASE ENTRY DATE: 2008-10-17
  ref <313>: RELEVANT RESIDUES IN SEQ ID NO: (1)..(960)
MTTRKKKRDGGGSGGGFIKKVSSLFNLDSVNGDDSWLYEDIQLERGNSGLGFSIAGGTDNPHIGTDTSIYITKLISGGAAAADGRLSINDIIVSVNDVSVVDVPHASAVDALKKAGNVVKLHVKRKRGTATTPAAGSAAGDARDSAASGPKVIEIDLVKGGKGLGFSIAGGIGNQHIPGDNGIYVTKLTDGGRAQVDGRLSIGDKLIAVRTNGSEKNLENVTHELAVATLKSITDKVTLIIGKTQHLTTSASGGGGGGLSSGQQLSQSQSQLATSQSQSQVHQQQHATPMVNSQSTGALNSMGQTVVDSPSIPQAAAAVAAAANASASASVIASNNTISNTTVTTVTATATASNDSSKLPPSLGANSSISISNSNSNSNSNNINNINSINNNNSSSSSTTATVAAATPTAASAAAAAASSPPANSFYNNASMPALPVESNQTNNRSQSPQPRQPGSRYASTNVLAAVPPGTPRAVSTEDITREPRTITIQKGPQGLGFNIVGGEDGQGIYVSFILAGGPADLGSELKRGDQLLSVNNVNLTHATHEEAAQALKTSGGVVTLLAQYRPEEYNRFEARIQELKQQAALGAGGSGTLLRTTQKRSLYVRALFDYDPNRDDGLPSRGLPFKHGDILHVTNASDDEWWQARRVLGDNEDEQIGIVPSKRRWERKMRARDRSVKFQGHAAANNNLDKQSTLDRKKKNFTFSRKFPFMKSRDEKNEDGSDQEPNGVVSSTSEIDINNVNNNQSNEPQPSEENVLSYEAVQRLSINYTRPVIILGPLKDRINDDLISEYPDKFGSCVPHTTRPKREYEVDGRDYHFVSSREQMERDIQNHLFIEAGQYNDNLYGTSVASVREVAEKGKHCILDVSGNAIKRLQVAQLYPVAVFIKPKSVDSVMEMNRRMTEEQAKKTYERAIKMEQEFGEYFTGVVQGDTIEEIYSKVKSMIWSQSGPTIWVPSKESL

SEQ ID NO: 12 - protein, 1745 aa, Mus musculus
  ref <308>: DATABASE ACCESSION NUMBER: GenBank / BAA03274
  ref <309>: DATABASE ENTRY DATE: 2007-12-13
  ref <313>: RELEVANT RESIDUES IN SEQ ID NO: (1)..(1745)
MSARAAAAKSTAMEETAIWEQHTVTLHRAPGFGFGIAISGGRDNPHFQSGETSIVISDVLKGGPAEGQLQENDRVAMVNGVSMDNVEHAFAVQQLRKSGKNAKITIRRKKKVQIPVSHPDPEPVSDNEDDSYDEEVHDPRAGRGALANRRSEKSWARDRSASRERSLSPRSDRRSVASSQPAKPTKVTLVKSRKNEEYGLRPASHIFVKEISQDSLAARDGDIQEGDVVLKINGTVTENMSLTDAKTLIERSKGKLKMVVQRDERATLLNVPDLSDSIHSANASERDDISEIQSLASDHSGRSHDRPPRRSQSRSPDQRSEPSDHSTQSPQQPSNGSLRSREEERMSKPGAISTPVKHVDDHPPKAVEEVTVEKNEKQTPTLPEPKPVYAQVGQPDVDLPVSPSDGALPNSAHEDGILRPSMKLVKFRKGDSVGLRLAGGNDVGIFVAGVLEDSPAAKEGLEEGDQILRVNNVDFTNIIREEAVLFLLDLPKGEEVTILAQKKKDVYRRIVESDVGDSFYIRTHFEYEKESPYGLSFNKGEVFRVVDTLYNGKLGSWLAIRIGKNHKEVERGIIPNKNRAEQLASVQYTLPKTAGGDRADFWRFRGLRSSKRNLRKSREDLSAQPVQTKFPAYERVVLREAGFLRPVTIFGPIADVAREKLAREEPDIYQIAKSELRDAGTDHRSSGIIRLHTIKQIIDQDKHALLDVTPNAVDRLNYAQWYPIVVFLNPDSKQGVKTMRMRLCPESRKSARKLYERSHKLRKNNHHLFTTTINLNSMNDGWYGALKEAIQQQQNQLVWVSEGKADGATSDDLDLHDDRLSYLSAPGSEYSMYSTDSRHTSDYEDTDTEGGAYTDQELDETLNDEVGTPPESAITRSSEPVREDSSGMHHENQTYPPYSPQAQPQAIHRIDSPGLKPASQQKAEASSPVPYLSPETTPASSASAVNHNVSVTNVSLEEPAPAPPTSHASQPGCLGAPSAEAAHVGLRGEGPPLPPHADPAKVYRKEPYSEEMMRQNHILKQPALGHPGQRPDKEPNLAYEPQLPYIEKQASRDLEQPSYRYEVSSYTDQFSRNYDHRLRFEDRIPTYEDQWSYYDDKQPYQPRPFENQHPRDLDSRQHPEEASERGYFQRFEEPAPLSYDSRTRYEQLPRTSTLRHEEQPAPAYEVHNRYRPEAQPYSSTGPKSSEPKQYFDQYPRSYEQVPPPGFTSKTGHYEPLHGAAVVPPLIPSSQQKPEVLRSATKPQPPPPTLTEEEEDPAMKPQSVLTRVKMFENKRSASLENKKDVNDTASFKPPEVASKPPGASLAGPKPVPQSQFSEHDKTLYRLPEPQKPQVKPPEDIVRSNHYDPEEDEEYYRKQLSYFDRRSFESKPSAHLPAGHHSEPAKPVHSQSQPNFPSYSSKGKPETDAVDRSFSEKRYDPAQATPPPPPLPSQYSQPAPPLSSSSLHIHSKGAQGEGNSVSLDFQNSYMSKPDPPPSQSKPATFRPPTREDPPQTFYPQKSFPDKAPVNGAEQTQKTITPVYNRFTPKPYTSSARPFERKFESPKFNHNLLPSETVHKPELSSKTPTSPKTLMKAHSSTQPPEFGSGVETFSVHTDKPKYQMNNISTMPKAVPVSPSAVEEDEDEDGHTVVATARGIFNSNGGVLSSIETGVSIIIPQGAIPEGIEQEIYFKVCRDNSILPPLDKEKGETLLSPLVMCGPHGLKFLKPVELRLPHCDPKTWQNKCLPGDPNYLVGANCVSVLIDHF

SEQ ID NO: 13 - protein, 5 aa, Artificial Sequence
  Synthetic peptide
  misc_feature (1)..(3): Xaa can be any naturally occurring amino acid
  misc_feature (5)..(5): Xaa can be any naturally occurring amino acid
XXXCX

SEQ ID NO: 14 - protein, 5 aa, Artificial Sequence
  Synthetic peptide
  MISC_FEATURE (1)..(1): Xaa is Thr, Ser, or Tyr
  MISC_FEATURE (2)..(2): Xaa is Glu or Asp
  MISC_FEATURE (3)..(3): Xaa is Phe or Tyr
  MISC_FEATURE (5)..(5): Xaa is Ala, Gly, Leu, Ile, or Val
XXXCX

SEQ ID NO: 15 - protein, 5 aa, Artificial Sequence
  Synthetic peptide
TEFCA

SEQ ID NO: 16 - protein, 7 aa, Artificial Sequence
  Synthetic peptide
GKTEFCA

SEQ ID NO: 17 - protein, 6 aa, Artificial Sequence
  Synthetic peptide
KTEFCA

SEQ ID NO: 18 - DNA, 42 bp, Artificial Sequence
  Synthetic primer
tctgttattgctagcgttttagcacaggtccagctggtgcag

SEQ ID NO: 19 - DNA, 33 bp, Artificial Sequence
  Synthetic primer
cttttgttcggatcctgcggccccgtgatggtg

SEQ ID NO: 20 - DNA, 33 bp, Artificial Sequence
  Synthetic primer
gttattgctagcgttttagcagcgggtgagctc

SEQ ID NO: 21 - DNA, 28 bp, Artificial Sequence
  Synthetic primer
ttgttcggatcccttgtcgaaggtctga

SEQ ID NO: 22 - protein, 14 aa, Artificial Sequence
  Synthetic peptide
GKPIPNPLLGLDST

SEQ ID NO: 23 - DNA, 56 bp, Artificial Sequence
  Synthetic primer
gatctgaaggccgcaggcaagaccgagttctgcgcctgatgagaggctagttctgc

SEQ ID NO: 24 - DNA, 56 bp, Artificial Sequence
  Synthetic primer
gcagaactagcctctcatcaggcgcagaactcggtcttgcctgcggccttcagatc

SEQ ID NO: 25 - DNA, 36 bp, Artificial Sequence
  Synthetic primer
gttattgctagcgttttagcacaggtccagctggtg

SEQ ID NO: 26 - DNA, 28 bp, Artificial Sequence
  Sythetic primer
cagcgggtttaaactcatcaggcgcaga

SEQ ID NO: 27 - DNA, 40 bp, Artificial Sequence
  Synthetic primer
aatattttctgttattgccagcgttttagcagcgggtgag

SEQ ID NO: 28 - DNA, 40 bp, Artificial Sequence
  Synthetic primer
ctcacccgctgctaaaacgctggcaataacagaaaatatt

SEQ ID NO: 29 - DNA, 20 bp, Artificial Sequence
  Synthetic primer
gttattgctagcgttttagc

SEQ ID NO: 30 - DNA, 42 bp, Artificial Sequence
  Synthetic primer
cggcttctaatccgtgttattactgagtagtatttatttaag

SEQ ID NO: 31 - DNA, 30 bp, Artificial Sequence
  Synthetic primer
ctactcagtaataacacggattagaagccg

SEQ ID NO: 32 - DNA, 19 bp, Artificial Sequence
  Synthetic primer
ggagataagcttttgttcg

SEQ ID NO: 33 - DNA, 123 bp, Artificial Sequence
  Synthetic nucleotide
cgactcactatagggaatattaagctaattctacttcatacattttcaattaagatgcagttacttcgctgtttttcaatattttctgttattgctagcgttttagcacaggtccagctggtg

SEQ ID NO: 34 - DNA, 24 bp, Artificial Sequence
  Synthetic primer
cgactcactatagggaatattaag

SEQ ID NO: 35 - DNA, 15 bp, Artificial Sequence
  Synthetic primer
caccagctggacctg

SEQ ID NO: 36 - DNA, 18 bp, Artificial Sequence
  Synthetic primer
caggtccagctggtgcag

SEQ ID NO: 37 - DNA, 12 bp, Artificial Sequence
  Synthetic primer
tgcggccccgtg

SEQ ID NO: 38 - DNA, 117 bp, Artificial Sequence
  Synthetic polynucleotide
cacggggccgcaggatccgaacaaaagcttatctccgaagaagacttgggtggtggtggatctggtggtggtggttctggtggtggtggttctcaggaactgacaactatatgcgag

SEQ ID NO: 39 - DNA, 12 bp, Artificial Sequence
  Synthetic primer
cacggggccgca

SEQ ID NO: 40 - DNA, 24 bp, Artificial Sequence
  Synthetic primer
ctcgcatatagttgtcagttcctg

SEQ ID NO: 41 - DNA, 24 bp, Artificial Sequence
  Synthetic primer
caggaactgacaactatatgcgag

SEQ ID NO: 42 - DNA, 45 bp, Artificial Sequence
  Synthetic primer
ggatcagcgggtttaaactcaaaaaacatactgtgtgtttatggg

SEQ ID NO: 43 - DNA, 89 bp, Artificial Sequence
  Synthetic polynucleotide
gaacaaaagcttatctccgaagaagacttgggtggtggtggatctggtggtggtggttctggtggtggtggttctttggcatctgatcc

SEQ ID NO: 44 - DNA, 19 bp, Artificial Sequence
  Synthetic primer
gaacaaaagcttatctccg

SEQ ID NO: 45 - DNA, 17 bp, Artificial Sequence
  Synthetic primer
ggatcagatgccaaaga

SEQ ID NO: 46 - DNA, 15 bp, Artificial Sequence
  Synthetic primer
tttggcatctgatcc

SEQ ID NO: 47 - DNA, 34 bp, Artificial Sequence
  Synthetic primer
cagcgggtttaaacttaactgaaaattacattgc

SEQ ID NO: 48 - DNA, 52 bp, Artificial Sequence
  Synthetic primer
gatgaattgaattgaaaagctagtttatcgatgggtccttttcatcacgtgc

SEQ ID NO: 49 - DNA, 52 bp, Artificial Sequence
  Synthetic primer
gcacgtgatgaaaaggacccatcgataaactagcttttcaattcaattcatc

SEQ ID NO: 50 - DNA, 72 bp, Artificial Sequence
  Synthetic polynucleotide
accttcgacaagagatcctgttacccatacgacgttccagactacgcttctttgggtggtggtggatctggt

SEQ ID NO: 51 - protein, 12 aa, Artificial Sequence
  Synthetic primer
CYPYDVPDYASL

SEQ ID NO: 52 - DNA, 18 bp, Artificial Sequence
  Synthetic primer
accttcgacaagagatcc

SEQ ID NO: 53 - DNA, 15 bp, Artificial Sequence
  Synthetic primer
accagatccaccacc

SEQ ID NO: 54 - DNA, 18 bp, Artificial Sequence
  Synthetic primer
ccgctgatctgataacaa

SEQ ID NO: 55 - DNA, 15 bp, Artificial Sequence
  Synthetic primer
gtcagcttggtccca

SEQ ID NO: 56 - DNA, 162 bp, Artificial Sequence
  Synthetic polynucleotide
tgggaccaagctgaccgtcctaggcctcgggggcctggaacaaaaactcatctcagaagaagatctgggaggggccgcacatcatcatcaccatcacggtggcgccgccggcaagaccgagttctgcgcctgatgagtttaaacccgctgatctgataacaa

SEQ ID NO: 57 - DNA, 15 bp, Artificial Sequence
  Synthetic primer
tgggaccaagctgac

SEQ ID NO: 58 - DNA, 18 bp, Artificial Sequence
  Synthetic primer
ttgttatcagatcagcgg

SEQ ID NO: 59 - DNA, 33 bp, Artificial Sequence
  Synthetic primer
atatattctagaatgggatggtcatgtatcatc

SEQ ID NO: 60 - DNA, 35 bp, Artificial Sequence
  Synthetic primer
atatatgcggccgctcatttacccggggacaggga

SEQ ID NO: 61 - DNA, 34 bp, Artificial Sequence
  Synthetic primer
atatatctcgagaattcacgcgtcgagcatgcat

SEQ ID NO: 62 - DNA, 33 bp, Artificial Sequence
  Synthetic primer
atatatctcgagtcatttacccggggacaggga

SEQ ID NO: 63 - DNA, 50 bp, Artificial Sequence
  Synthetic primer
ttctgcttgtggccctgcaggcccaagcgcagcctgtgctgactcagccc

SEQ ID NO: 64 - DNA, 24 bp, Artificial Sequence
  Synthetic primer
gcaggtgtatcttatacacgtggc

SEQ ID NO: 65 - DNA, 69 bp, Artificial Sequence
  Synthetic primer
atatatgtcgacaccatgcgtactctggctatccttgcagctattctgcttgtggccctgcaggcccaa

SEQ ID NO: 66 - DNA, 48 bp, Artificial Sequence
  Synthetic primer
atatatgtggccctgcaggcccaagcgcaggctgtgctgactcagccg

SEQ ID NO: 67 - DNA, 29 bp, Artificial Sequence
  Synthetic primer
atatataggcctaggacggtcagcttggt

SEQ ID NO: 68 - DNA, 36 bp, Artificial Sequence
  Synthetic primer
atatatgccatggcccaggtccagctggtgcagtct

SEQ ID NO: 69 - DNA, 37 bp, Artificial Sequence
  Synthetic primer
atatatgctagcactggagacggtgaccagggtgcct

SEQ ID NO: 70 - DNA, 33 bp, Artificial Sequence
  Synthetic primer
atatatgctagcacaaagggcccatcggtcttc

SEQ ID NO: 71 - DNA, 57 bp, Artificial Sequence
  Synthetic primer
atatatctcgagtcaggcgcagaactcggtcttgcctttacccggggacagggagag

SEQ ID NO: 72 - DNA, 66 bp, Artificial Sequence
  Synthetic primer
atatatctcgagtcaggcgcagaactcggtcttgcctgcggcccctttacccggggacagggagag

SEQ ID NO: 73 - DNA, 72 bp, Artificial Sequence
  Synthetic primer
atatatctcgagtcaggcgcagaactcggtcttgcctgaaccgccgcctcctttacccggggacagggagag

SEQ ID NO: 74 - protein, 5 aa, Artificial Sequence
  Synthetic spacer
GGGGS

SEQ ID NO: 75 - DNA, 42 bp, Artificial Sequence
  Synthetic primer
aactgcaactggagtgcattccgcgggtgagctcattcacat

SEQ ID NO: 76 - DNA, 33 bp, Artificial Sequence
  Synthetic primer
ctggcccacagcagaaccaccaccaccagaacc

SEQ ID NO: 77 - DNA, 33 bp, Artificial Sequence
  Synthetic primer
ggttctggtggtggtggttctgctgtgggccag

SEQ ID NO: 78 - DNA, 48 bp, Artificial Sequence
  Synthetic primer
ctttgtgacgggcgggctcgaggccgtcgcacctaacgtggcttcttc

SEQ ID NO: 79 - DNA, 22 bp, Artificial Sequence
  Synthetic primer
aactgcaactggagtgcattcc

SEQ ID NO: 80 - DNA, 16 bp, Artificial Sequence
  Synthetic primer
ctttgtgacgggcggg

SEQ ID NO: 81 - DNA, 39 bp, Artificial Sequence
  Synthetic primer
gccggcaagaccgagttctccgcctgatgagtttaaacc

SEQ ID NO: 82 - DNA, 39 bp, Artificial Sequence
  Synthetic primer
ggtttaaactcatcaggcggagaactcggtcttgccggc

SEQ ID NO: 83 - DNA, 40 bp, Artificial Sequence
  Synthetic primer
caagaagtccttcggcatctccatagtgcgcggcgaggtg

SEQ ID NO: 84 - DNA, 40 bp, Artificial Sequence
  Synthetic primer
cacctcgccgcgcactatggagatgccgaaggacttcttg

SEQ ID NO: 85 - DNA, 45 bp, Artificial Sequence
  Synthetic primer
gttattgccagcgttttagcatgatgagcgggtgagctcattcac

SEQ ID NO: 86 - DNA, 45 bp, Artificial Sequence
  Synthetic primer
gtgaatgagctcacccgctcatcatgctaaaacgctggcaataac

SEQ ID NO: 87 - DNA, 45 bp, Artificial Sequence
  Synthetic primer
gttattgccagcgttttagcatgatgacaggtccagctggtgcag

SEQ ID NO: 88 - DNA, 45 bp, Artificial Sequence
  Synthetic primer
ctgcaccagctggacctgtcatcatgctaaaacgctggcaataac

SEQ ID NO: 89 - DNA, 57 bp, Artificial Sequence
  Synthetic primer
taagatgcagttacttcgctgtttttcaatattttctgttattgctagcgttttagc

SEQ ID NO: 90 - DNA, 62 bp, Artificial Sequence
  Synthetic primer
atgatgtgcggcccctcccagatcttcttctgagatgagtttttgttccaggcccccgaggc

SEQ ID NO: 91 - protein, 316 aa, Caenorhabditis elegans
MGLKGFTGSFQQIRGLLRPPKNLPFRGIFRKDGEVVRKDDLLVNQFKMNYHPGLNVYYENDRGERLLRAHCDGIVRISQEKCDPDYEIEEMKGYEYRKDVDLYKMTFNMDNPDGPNLERDVQRILELMEHVQKTGEVNNAKLASLQQVLQSEFFGAVREVYETVYESIDADTTPEIKAAATAKATVAAFAAAEGHAHPRIVELPKTDQGLGFNVMGGKEQNSPIYISRIIPGGVADRHGGLKRGDQLIAVNGNVEAECHEKAVDLLKSAVGSVKLVIRYMPKLLDEMERRFERQRIRSTQQSPTLPTPSSSTNPRR

SEQ ID NO: 92 - protein, 623 aa, Drosophila melanogaster
MDADRGGGQETKVIYHIDDETTPYLVKIPIPSAQVTLRDFKLVLNKQNNNYKYFFKSMDADFGVVKEEIADDSTILPCFNGRVVSWLVSADGTNQSDNCSELPTSECELGMGLTNRKLQQQQQQHQQQQQQQQQQHQQQQQQQQQQVQPVQLAQQQQQQVLHHQKMMGNPLLQPPPLTYQSASVLSSDLDSTSLFGTESELTLDRDMTDYSSVQRLQVRKKPQRRKKRAPSMSRTSSYSSITDSTMSLNIITVSINMEAVNFLGISIVGQSNRGGDGGIYVGSIMKGGAVALDGRIEPGDMILQVNDVNFENMTNDEAVRVLREVVQKPGPIKLVVAKCWDPNPKGYFTIPRTEPVRPIDPGAWVAHTQALTSHDSIIADIAEPIKERLDQNNLEEIVKAMTKPDSGLEIRDRMWLKITIPNAFIGADAVNWVLENVEDVQDRREARRIVSAMLRSNYIKHTVNKLTFSEQCYYVVNEERNPNLLGRGHLHPHQLPHGHGGHALSHADTESITSDIGPLPNPPIYMPYSATYNPSHGYQPIQYGIAERHISSGSSSSDVLTSKDISASQSDITSVIHQANQLTIAAHGSNKSSGSSNRGGGGGGGGGGNNTNDQDVSVFNYVL

SEQ ID NO: 93 - protein, 1247 aa, Drosophila melanogaster
MFKCIPIFKGCNRQVEFVDKRHCSLPQVPEEILRYSRTLEELFLDANHIRDLPKNFFRLHRLRKLGLSDNEIGRLPPDIQNFENLVELDVSRNDIPDIPDDIKHLQSLQVADFSSNPIPKLPSGFSQLKNLTVLGLNDMSLTTLPADFGSLTQLESLELRENLLKHLPETISQLTKLKRLDLGDNEIEDLPPYLGYLPGLHELWLDHNQLQRLPPELGLLTKLTYLDVSENRLEELPNEISGLVSLTDLDLAQNLLEALPDGIAKLSRLTILKLDQNRLQRLNDTLGNCENMQELILTENFLSELPASIGQMTKLNNLNVDRNALEYLPLEIGQCANLGVLSLRDNKLKKLPPELGNCTVLHVLDVSGNQLLYLPYSLVNLQLKAVWLSENQSQPLLTFQPDTDAETGEQVLSCYLLPQQEYQPITPARDLESDSEPFEEREPSRTVVKFSEEATQEKETPFVRQNTPHPKDLKAKAQKLKVERSRNEEHANLVTLPEENGTKLAETPTETRTIANNHQQQPHPVQQPIVGVNSKQPVVVGVVTPTTTTVAPTGVQGGSEGASSTANNVKAATAAVVAELAATVGGSDEVQDDDEQEDEFESDRRVGFQVEGEDDDFYKRPPKLHRRDTPHHLKNKRVQHLTDKQASEILANALASQERNDTTPQHSLSGKVTSPIEEEEQLEVEQEQQQQQQQHPFDSSLSPISAGKTAEASTDPDNLDGVTELRLEQYEIHIERTAAGLGLSIAGGKGSTPFKGDDDGIFISRVTEAGPADLAGLKVGDKVIKVNGIVVVDADHYQAVQVLKACGAVLVLVVQREVTRLIGHPVFSEDGSVSQISVETRPLVADAPPAASISHERYIPAPIEIVPQQQHLQQQQQQPIQQVAPTHSYSGNVFATPTAAQTVQPAVSAAPNGLLLNGREAPLSYIQLHTTLIRDQIGQGLGFSIAGGKGSPPFKDDCDGIFISRITEGGLAYRDGKIMVGDRVMAINGNDMTEAHHDAAVACLTEPQRFVRLVLQREYRGPLEPPTSPRSPAVLNSLSPSGYLANRPANFSRSVVEVEQPYKYNTLATTTPTPKPTVPASISNNNNTLPSSKTNGFATAAAATIDSSTGQPVPAPRRTNSVPMGDGDIGAGSTTSGDSGEAQPSSLRPLTSDDFQAMIPAHFLSGGSQHQVHVARPNEVGVSAVTVNVNKPQPDLPMFPAAPTELGRVTETITKSTFTETVMTRITDNQLAEPLISEVTISTSRIH

SEQ ID NO: 94 - protein, 816 aa, Drosophila melanogaster
MDSDTDSEREKSSDPNEGLLSSDDKTFHDDDEPAEDSSPADDEEEPEEEECLLPQKKAQIRCDQDQPPLVVLVQPSAEAIEVRQEIDDTNPVAVAAKASDMDGDSQLEVMEHQMETVTEPDPEPPKCPTSLRDSVRESVECFYSAQDLLEYGHMLSSTSMVRTPDVESGYFEKSESDASRDEWEGPSSSSSGAARCRLLSGISGLSVSSSSRHSAEGLRMELSRFRTMIETLERESLEKSQSELQLKAKSKAKPKPKQRSHVQDAAGESGSEQGSERGFWSTIFGQAGLAISQDEEERIADIQKAHRALELLEDYHARLSEPQDRALRIAIERVIRIFKSRLFQALLDIQEFYELTLLDDSKSIQQKTAETLQIATKWEKDGQAVKIADFIKSSNLNRNCAYEFNNDASSNQTNQSALNQNPIANNVSAQAQAEALSRTFKSELEEILNQRMRIESDTENAKEPTVEQQQKQQQAQQRSSRSPQQQNPQQQQGSKSRSGSQTVNGDDSWLYEDIQLERGNSGLGFSIAGGTDNPHIGTDTSIYITKLISGGAAAADGRLSINDIIVSVNDVSVVDVPHASAVDALKKAGNVVKLHVKRKRGTATTPAAGSAAGDARDSAASGPKVIEIDLVKGGKGLGFSIAGGIGNQHIPGDNGIYVTKLMDGGAAQVDGRLSIGDKLIAVRTNGSEKNLENVTHELAVATLKSITDKVTLIIGKTQHLTTSASGGGGGGLSSGQQLSQSQSQLATSQSQSQVHQQQHATPMVNSQSTAFMLCYTQDDANAEGGEIIYRVELPDMEQITLIYLENNDADYRKSSI

SEQ ID NO: 95 - protein, 207 aa, Homo sapiens
MAALVEPLGLERDVSRAVELLERLQRSGELPPQKLQALQRVLQSRFCSAIREVYEQLYDTLDITGSAEIRAHATAKATVAAFTASEGHAHPRVVELPKTDEGLGFNIMGGKEQNSPIYISRVIPGGVADRHGGLKRGDQLLSVNGVSVEGEQHEKAVELLKAAQGSVKLVVRYTPRVLEEMEARFEKMRSARRRQQHQSYSSLESRG

SEQ ID NO: 96 - protein, 1743 aa, Homo sapiens
MSAGGRDEERRKLADIIHHWNANRLDLFEISQPTEDLEFHGVMRFYFQDKAAGNFATKCIRVSSTATTQDVIETLAEKFRPDMRMLSSPKYSLYEVHVSGERRLDIDEKPLVVQLNWNKDDREGRFVLKNENDAIPPKAQSNGPEKQEKEGVIQNFKRTLSKKEKKEKKKREKEALRQASDKDDRPFQGEDVENSRLAAEVYKDMPETSFTRTISNPEVVMKRRRQQKLEKRMQEFRSSDGRPDSGGTLRIYADSLKPNIPYKTILLSTTDPADFAVAEALEKYGLEKENPKDYCIARVMLPPGAQHSDEKGAKEIILDDDECPLQIFREWPSDKGILVFQLKRRPPDHIPKKTKKHLEGKTPKGKERADGSGYGSTLPPEKLPYLVELSPDGSDSRDKPKLYRLQLSVTEVGTEKLDDNSIQLFGPGIQPHHCDLTNMDGVVTVTPRSMDAETYVEGQRISETTMLQSGMKVQFGASHVFKFVDPSQDHALAKRSVDGGLMVKGPRHKPGIVQETTFDLGGDIHSGTALPTSKSTTRLDSDRVSSASSTAERGMVKPMIRVEQQPDYRRQESRTQDASGPELILPASIEFRESSEDSFLSAIINYTNSSTVHFKLSPTYVLYMACRYVLSNQYRPDISPTERTHKVIAVVNKMVSMMEGVIQKQKNIAGALAFWMANASELLNFIKQDRDLSRITLDAQDVLAHLVQMAFKYLVHCLQSELNNYMPAFLDDPEENSLQRPKIDDVLHTLTGAMSLLRRCRVNAALTIQLFSQLFHFINMWLFNRLVTDPDSGLCSHYWGAIIRQQLGHIEAWAEKQGLELAADCHLSRIVQATTLLTMDKYAPDDIPNINSTCFKLNSLQLQALLQNYHCAPDEPFIPTDLIENVVTVAENTADELARSDGREVQLEEDPDLQLPFLLPEDGYSCDVVRNIPNGLQEFLDPLCQRGFCRLIPHTRSPGTWTIYFEGADYESHLLRENTELAQPLRKEPEIITVTLKKQNGMGLSIVAAKGAGQDKLGIYVKSVVKGGAADDGRLAAGDQLLSVDGRSLVGLSQERAAELMTRTSSVVTLEVAKQGAIYHGLATLLNQPSPMMQRISDRRGSGKPRPKSEGFELYNNSTQNGSPESPQLPWAEYSEPKKLPGDDRLMKNRADHRSSPNVANQPPSPGGKSAYASGTTAKITSVSTGNLCTEEQTPPPRPEAYPIPTQTYTREYFTFPASKSQDRMAPPQNQWPNYEEKPHMHTDSNHSSIAIQRVTRSQEELREDKAYQLERHRIEAAMDRKSDSDMWINQSSSLDSSTSSQEHLNHSSKSVTPASTLTKSGPGRWKTPAAIPATPVAVSQPIRTDLPPPPPPPPVHYAGDFDGMSMDLPLPPPPSANQIGLPSAQVAAAERRKREEHQRWYEKEKARLEEERERKRREQERKLGQMRTQSLNPAPFSPLTAQQMKPEKPSTLQRPQETVIRELQPQQQPRTIERRDLQYITVSKEELSSGDSLSPDPWKRDAKEKLEKQQQMHIVDMLSKEIQELQSKPDRSAEESDRLRKLMLEWQFQKRLQESKQKDEDDEEEEDDDVDTMLIMQRLEAERRARLQDEERRRQQQLEEMRKREAEDRARQEEERRRQEEERTKRDAEEKRRQEEGYYSRLEAERRRQHDEAARRLLEPEAPGPNSYPGSTGAAVGAHDACRDAKEKRSKSQDADSPGSSGAPENLTFKERQRLFSQGQDVSNKVKASRKLTELENELNTK

SEQ ID NO: 97 - protein, 552 aa, Homo sapiens
MDRKVAREFRHKVDFLIENDAEKDYLYDVLRMYHQTMDVAVLVGDLKLVINEPSRLPLFDAIRPLIPLKHQVEYDQLTPRRSRKLKEVRLDRLHPEGLGLSVRGGLEFGCGLFISHLIKGGQADSVGLQVGDEIVRINGYSISSCTHEEVINLIRTKKTVSIKVRHIGLIPVKSSPDEPLTWQYVDQFVSESGGVRGSLGSPGNRENKEKKVFISLVGSRGLGCSISSGPIQKPGIFISHVKPGSLSAEVGLEIGDQIVEVNGVDFSNLDHKEAVNVLKSSRSLTISIVAAAGRELFMTDRERLAEARQRELQRQELLMQKRLAMESNKILQEQQEMERQRRKEIAQKAAEENERYRKEMEQIVEEEEKFKKQWEEDWGSKEQLLLPKTITAEVHPVPLRKPKYDQGVEPELEPADDLDGGTEEQGEQDFRKYEEGFDPYSMFTPEQIMGKDVRLLRIKKEGSLDLALEGGVDSPIGKVVVSAVYERGAAERHGGIVKGDEIMAINGKIVTDYTLAEAEAALQKAWNQGGDWIDLVVAVCPPKEYDDELTFF

SEQ ID NO: 98 - protein, 1455 aa, Rattus norvegicus
MSKSLKKKSHWTSKVHESVIGRNPEGQLGFELKGGAENGQFPYLGEVKPGKVAYESGSKLVSEELLLEVNETPVAGLTIRDVLAVIKHCKDPLRLKCVKQGGIVDKDLRHYLNLRFQKGSVDHELQQIIRDNLYLRTVPCTTRPHKEGEVPGVDYIFITVEDFMELEKSGALLESGTYEDNYYGTPKPPAEPAPLLLNVTDQILPGATPSAEGKRKRNKSVSNMEKASIEPPEEEEEERPVVNGNGVVVTPESSEHEDKSAGASGEMPSQPYPAPVYSQPEELKEQMDDTKPTKPEDNEEPDPLPDNWEMAYTEKGEVYFIDHNTKTTSWLDPRLAKKAKPPEECKENELPYGWEKIDDPIYGTYYVDHINRRTQFENPVLEAKRKLQQHNMPHTELGTKPLQAPGFREKPLFTRDASQLKGTFLSTTLKKSNMGFGFTIIGGDEPDEFLQVKSVIPDGPAAQDGKMETGDVIVYINEVCVLGHTHADVVKLFQSVPIGQSVNLVLCRGYPLPFDPEDPANSMVPPLAIMERPPPVMVNGRHNYETYLEYISRTSQSVPDITDRPPHSLHSMPTDGQLDGTYPPPVHDDNVSMASSGATQAELMTLTIVKGAQGFGFTIADSPTGQRVKQILDIQGCPGLCEGDLIVEINQQNVQNLSHTEVVDILKDCPIGSETSLIIHRGGFFSPWKTPKPIMDRWENQGSPQTSLSAPAIPQNLPFPPALHRSSFPDSTEAFDPRKPDPYELYEKSRAIYESRQQVPPRTSFRMDSSGPDYKELDVHLRRMESGFGFRILGGDEPGQPILIGAVIAMGSADRDGRLHPGDELVYVDGIPVAGKTHRYVIDLMHHAARNGQVNLTVRRKVLCGGEPCPENGRSPGSVSTHHSSPRSDYATYTNSNHAAPSSNASPPEGFASHSLQTSDVVIHRKENEGFGFVIISSLNRPESGSTITVPHKIGRIIDGSPADRCAKLKVGDRILAVNGQSIINMPHADIVKLIKDAGLSVTLRIIPQEELNSPTSAPSSEKQSPMAQQSPLAQQSPLAQPSPATPNSPIAQPAPPQPLQLQGHENSYRSEVKARQDVKPDIRQPPFTDYRQPPLDYRQPPGGDYQQPPPLDYRQPPLLDYRQHSPDTRQYPLSDYRQPQDFDYFTVDMEKGAKGFGFSIRGGREYKMDLYVLRLAEDGPAIRNGRMRVGDQIIEINGESTRDMTHARAIELIKSGGRRVRLLLKRGTGQVPEYDEPAPWSSPAAAAPGLPEVGVSLDDGLAPFSPSHPAPPSDPSHQISPGPTWDIKREHDVRKPKELSACGQKKQRLGEQRERSASPQRAARPRLEEAPGGQGRPEAGRPASEARAPGLAAADAADAARAGGKEAPRAAAGSELCRREGPGAAPAFAGPGGGGSGALEAEGRAGARAGPRPGPRPPGGAPARKAAVAPGPWKVPGSDKLPSVLKPGASAASR

SEQ ID NO: 99 - protein, 898 aa, Homo sapiens
MADDDVLFEDVYELCEVIGKGPFSVVRRCINRETGQQFAVKIVDVAKFTSSPGLSTEDLKREASICHMLKHPHIVELLETYSSDGMLYMVFEFMDGADLCFEIVKRADAGFVYSEAVASHYMRQILEALRYCHDNNIIHRDVKPHCVLLASKENSAPVKLGGFGVAIQLGESGLVAGGRVGTPHFMAPEVVKREPYGKPVDVWGCGVILFILLSGCLPFYGTKERLFEGIIKGKYKMNPRQWSHISESAKDLVRRMLMLDPAERITVYEALNHPWLKERDRYAYKIHLPETVEQLRKFNARRKLKGAVLAAVSSHKFNSFYGDPPEELPDFSEDPTSSGLLAAERAVSQVLDSLEEIHALTDCSEKDLDFLHSVFQDQHLHTLLDLYDKINTKSSPQIRNPPSDAVQRAKEVLEEISCYPENNDAKELKRILTQPHFMALLQTHDVVAHEVYSDEALRVTPPPTSPYLNGDSPESANGDMDMENVTRVRLVQFQKNTDEPMGITLKMNELNHCIVARIMHGGMIHRQGTLHVGDEIREINGISVANQTVEQLQKMLREMRGSITFKIVPSYRTQSSSCEDLPSTTQPKGRQIYVRAQFEYDPAKDDLIPCKEAGIRFRVGDIIQIISKDDHNWWQGKLENSKNGTAGLIPSPELQEWRVACIAMEKTKQEQQASCTWFGKKKKQYKDKYLAKHNADLVTYEEVVKLPAFKRKTLVLLGAHGVGRRHIKNTLITKHPDRFAYPIPHTTRPPKKDEENGKNYYFVSHDQMMQDISNNEYLEYGSHEDAMYGTKLETIRKIHEQGLIAILDVEPQALKVLRTAEFAPFVVFIAAPTITPGLNEDESLQRLQKESDILQRTYAHYFDLTIINNEIDETIRHLEEAVELVCTAPQWVPVSWVY

SEQ ID NO: 100 - protein, 1211 aa, Homo sapiens
MATTATPATNQGWPEDFGFRLGGSGPCFVLEVAKGSSAHAGGLRPGDQILEVEGLAVGGLSRERLVRLARRCPRVPPSLGVLPAPDGGPGPGSGPAAPTTVLRAPRCGRGLALGRELLRLAGRKRPDAVHRERRRKAQEFSRKVDEILGDQPTAKEQVFAALKQFAAEQRVDDLVWTLTLALPREACGPLLDNLRIFIPKKHRARFDEVVSQGLLGKLCRARRAQGAQRLRRSRSEERPERLLVSTRASAPPRRPDEPPPRRASLLVGGLAGPGGARRTVRVYKGNKSFGFTLRGHGPVWIESVLPGSPADNAALKSGDRILFLNGLDMRNCSHDKVVSMLQGSGAMPTLVVEEGLVPFASDSDSLDSPNPSSALTSLQWVAEILPSSIRVQGRTFSQQLEHLLTPPERYGVCRALESFFQHRNIDTLIVDVYPVLDTPAKQVLWQFIYQLLTYEEQELCQEKIACFLGYTAMTAEPEPELDLESEPTPEPQPRSSLRASSMCRRSLRSQGLEAGLSCGPSECPEMPLPLIPGERQAGDGTSLPETPNPKMMSAVYAELESRLNSSFKGKMGTVSKSRASPPGPSPAVTTGPRTLSGVSWPSERLLPSPCYHPLCSGGLASPSSSESHPYASLDSSRAPSPQPGPGPICPDSPPSPDPTRPPSRRKLFTFSHPVRSRDTDRFLDVLSEQLGPRVTIVDDFLTPENDYEEMSFHDDQGSFVTNERSSASDCISSSEEGSSLTYSSISDHIPPPPLSPPPPPPLPFHDAKPSSRSSDGSRGPAQALAKPLTQLSHPVPPPPPPPLPPPVPCAPPMLSRGLGHRRSETSHMSVKRLRWEQVENSEGTIWGQLGEDSDYDKLSDMVKYLDLELHFGTQKPAKPVPGPEPFRKKEVVEILSHKKAYNTSILLAHLKLSPAELRQVLMSMEPRRLEPAHLAQLLLFAPDADEEQRYQAFREAPGRLSEPDQFVLQMLSVPEYKTRLRSLHFQATLQEKTEEIRGSLECLRQASLELKNSRKLAKILEFVLAMGNYLNDGQPKTNKTTGFKINFLTELNSTKTVDGKSTFLHILAKSLSQHFPELLGFAQDLPTVPLAAKVNQRALTSDLADLHGTISEIQDACQSISPSSEDKFAMVMSSFLETAQPALRALDGLQREAMEELGKALAFFGEDSKATTSEAFFGIFAEFMSKFERALSDLQAGEGLRSSGMVSPLAW

SEQ ID NO: 101 - protein, 1801 aa, Homo sapiens
MPENPATDKLQVLQVLDRLKMKLQEKGDTSQNEKLSMFYETLKSPLFNQILTLQQSIKQLKGQLNHIPSDCSANFDFSRKGLLVFTDGSITNGNVHRPSNNSTVSGLFPWTPKLGNEDFNSVIQQMAQGRQIEYIDIERPSTGGLGFSVVALRSQNLGKVDIFVKDVQPGSVADRDQRLKENDQILAINHTPLDQNISHQQAIALLQQTTGSLRLIVAREPVHTKSSTSSSLNDTTLPETVCWGHVEEVELINDGSGLGFGIVGGKTSGVVVRTIVPGGLADRDGRLQTGDHILKIGGTNVQGMTSEQVAQVLRNCGNSVRMLVARDPAGDISVTPPAPAALPVALPTVASKGPGSDSSLFETYNVELVRKDGQSLGIRIVGYVGTSHTGEASGIYVKSIIPGSAAYHNGHIQVNDKIVAVDGVNIQGFANHDVVEVLRNAGQVVHLTLVRRKTSSSTSPLEPPSDRGTVVEPLKPPALFLTGAVETETNVDGEDEEIKERIDTLKNDNIQALEKLEKVPDSPENELKSRWENLLGPDYEVMVATLDTQIADDAELQKYSKLLPIHTLRLGVEVDSFDGHHYISSIVSGGPVDTLGLLQPEDELLEVNGMQLYGKSRREAVSFLKEVPPPFTLVCCRRLFDDEASVDEPRRTETSLPETEVDHNMDVNTEEDDDGELALWSPEVKIVELVKDCKGLGFSILDYQDPLDPTRSVIVIRSLVADGVAERSGGLLPGDRLVSVNEYCLDNTSLAEAVEILKAVPPGLVHLGICKPLVEDNEEESCYILHSSSNEDKTEFSGTIHDINSSLILEAPKGFRDEPYFKEELVDEPFLDLGKSFHSQQKEIEQSKEAWEMHEFLTPRLQEMDEEREMLVDEEYELYQDPSPSMELYPLSHIQEATPVPSVNELHFGTQWLHDNEPSESQEARTGRTVYSQEAQPYGYCPENVMKENFVMESLPSVPSTEGNSQQGRFDDLENLNSLAKTSLDLGMIPNDVQGPSLLIDLPVVAQRREQEDLPLYQHQATRVISKASAYTGMLSSRYATDTCELPEREEGEGEETPNFSHWGPPRIVEIFREPNVSLGISIVGGQTVIKRLKNGEELKGIFIKQVLEDSPAGKTNALKTGDKILEVSGVDLQNASHSEAVEAIKNAGNPVVFIVQSLSSTPRVIPNVHNKANKITGNQNQDTQEKKEKRQGTAPPPMKLPPPYKALTDDSDENEEEDAFTDQKIRQRYADLPGELHIIELEKDKNGLGLSLAGNKDRSRMSIFVVGINPEGPAAADGRMRIGDELLEINNQILYGRSHQNASAIIKTAPSKVKLVFIRNEDAVNQMAVTPFPVPSSSPSSIEDQSGTEPISSEEDGSVEVGIKQLPESESFKLAVSQMKQQKYPTKVSFSSQEIPLAPASSYHSTDADFTGYGGFQAPLSVDPATCPIVPGQEMIIEISKGRSGLGLSIVGGKDTPLNAIVIHEVYEEGAAARDGRLWAGDQILEVNGVDLRNSSHEEAITALRQTPQKVRLVVYRDEAHYRDEENLEIFPVDLQKKAGRGLGLSIVGKRNGSGVFISDIVKGGAADLDGRLIQGDQILSVNGEDMRNASQETVATILKCAQGLVQLEIGRLRAGSWTSARTTSQNSQGSQQSAHSSCHPSFAPVITGLQNLVGTKRVSDPSQKNSGTDMEPRTVEINRELSDALGISIAGGRGSPLGDIPVFIAMIQASGVAARTQKLKVGDRIVSINGQPLDGLSHADVVNLLKNAYGRIILQVVADTNISAIAAQLENMSTGYHLGSPTAEHHPEDTEEQLQMTAD

SEQ ID NO: 102 - protein, 1371 aa, Homo sapiens
MTTKRSLFVRLVPCRCLRGEEETVTTLDYSHCSLEQVPKEIFTFEKTLEELYLDANQIEELPKQLFNCQSLHKLSLPDNDLTTLPASIANLINLRELDVSKNGIQEFPENIKNCKVLTIVEASVNPISKLPDGFSQLLNLTQLYLNDAFLEFLPANFGRLTKLQILELRENQLKMLPKTMNRLTQLERLDLGSNEFTEVPEVLEQLSGLKEFWMDANRLTFIPGFIGSLKQLTYLDVSKNNIEMVEEGISTCENLQDLLLSSNSLQQLPETIGSLKNITTLKIDENQLMYLPDSIGGLISVEELDCSFNEVEALPSSIGQLTNLRTFAADHNYLQQLPPEIGSWKNITVLFLHSNKLETLPEEMGDMQKLKVINLSDNRLKNLPFSFTKLQQLTAMWLSDNQSKPLIPLQKETDSETQKMVLTNYMFPQQPRTEDVMFISDNESFNPSLWEEQRKQRAQVAFECDEDKDEREAPPREGNLKRYPTPYPDELKNMVKTVQTIVHRLKDEETNEDSGRDLKPHEDQQDINKDVGVKTSESTTTVKSKVDEREKYMIGNSVQKISEPEAEISPGSLPVTANMKASENLKHIVNHDDVFEESEELSSDEEMKMAEMRPPLIETSINQPKVVALSNNKKDDTKETDSLSDEVTHNSNQNNSNCSSPSRMSDSVSLNTDSSQDTSLCSPVKQTHIDINSKIRQEDENFNSLLQNGDILNSSTEEKFKAHDKKDFNLPEYDLNVEERLVLIEKSVDSTATADDTHKLDHINMNLNKLITNDTFQPEIMERSKTQDIVLGTSFLSINSKEETEHLENGNKYPNLESVNKVNGHSEETSQSPNRTEPHDSDCSVDLGISKSTEDLSPQKSGPVGSVVKSHSITNMEIGGLKIYDILSDNGPQQPSTTVKITSAVDGKNIVRSKSATLLYDQPLQVFTGSSSSSDLISGTKAIFKFDSNHNPEEPNIIRGPTSGPQSAPQIYGPPQYNIQYSSSAAVKDTLWHSKQNPQIDHASFPPQLLPRSESTENQSYAKHSANMNFSNHNNVRANTAYHLHQRLGPARHGEMWAISPNDRLIPAVTRSTIQRQSSVSSTASVNLGDPGSTRRAQIPEGDYLSYREFHSAGRTPPMMPGSQRPLSARTYSIDGPNASRPQSARPSINEIPERTMSVSDFNYSRTSPSKRPNARVGSEHSLLDPPGKSKVPRDWREQVLRHIEAKKLEKMPLSNGQMGQPLRPQANYSQIHHPPQASVARHPSREQLIDYLMLKVAHQPPYTQPHCSPRQGHELAKQEIRVRVEKDPELGFSISGGVGGRGNPFRPDDDGIFVTRVQPEGPASKLLQPGDKIIQANGYSFINIEHGQAVSLLKTFQNTVELIIVREVSS

SEQ ID NO: 103 - protein, 236 aa, Homo sapiens
MFCTLNTHKVDMDKLLGGQIGLEDFIFAHVKGQRKEVEVFKSEDALGLTITDNGAGYAFIKRIKEGSVIDHIHLISVGDMIEAINGQSLLGCRHYEVARLLKELPRGRTFTLKLTEPRKAFDMISQRSAGGRPGSGPQLGTGRGTLRLRSRGPATVEDLPSAFEEKAIEKVDDLLESYMGIRDTELAATMVELGKDKRNPDELAEALDERLGDFAFPDEFVFDVWGAIGDAKVGRY

SEQ ID NO: 104 - protein, 462 aa, Homo sapiens
MSAGGPCPAAAGGGPGGASCSVGAPGGVSMFRWLEVLEKEFDKAFVDVDLLLGEIDPDQADITYEGRQKMTSLSSCFAQLCHKAQSVSQINHKLEAQLVDLKSELTETQAEKVVLEKEVHDQLLQLHSIQLQLHAKTGQSADSGTIKAKLSGPSVEELERELEANKKEKMKEAQLEAEVKLLRKENEALRRHIAVLQAEVYGARLAAKYLDKELAGRVQQIQLLGRDMKGPAHDKLWNQLEAEIHLHRHKTVIRACRGRNDLKRPMQAPPGHDQDSLKKSQGVGPIRKVLLLKEDHEGLGISITGGKEHGVPILISEIHPGQPADRCGGLHVGDAILAVNGVNLRDTKHKEAVTILSQQRGEIEFEVVYVAPEVDSDDENVEYEDESGHRYRLYLDELEGGGNPGASCKDTSGEIKVLQGFNKKAVTDTHENGDLGTASETPLDDGASKLDDLHTLYHKKSY

SEQ ID NO: 105 - protein, 505 aa, Homo sapiens
MEKAADLQDTASLTLKFKFNPKLGIDNPVLSLAEDHDPYDPWSLERPRFCLLSKEEGKSFGFHLQQELGRAGHVVCRVDPGTSAQRQGLQEGDRILAVNNDVVEHEDYAVVVRRIRASSPRVLLTVLARHAHDVARAQLGEDAHLCPTLGPGVRPRLCHIVKDEGGFGFSVTHGNQGPFWLVLSTGGAAERAGVPPGARLLEVNGVSVEKFTHNQLTRKLWQSGQQVTLLVAGPEVEEQCRQLGLPLAAPLAEGWALPTKPRCLHLEKGPQGFGFLLREEKGLDGRPGQFLWEVDPGLPAKKAGMQAGDRLVAVAGESVEGLGHEETVSRIQGQGSCVSLTVVDPEADRFFSMVRLSPLLFLENTEAPASPRGSSSASLVETEDPSLEDTSVPSVPLGSRQCFLYPGPGGSYGFRLSCVASGPRLFISQVTPGGSAARAGLQVGDVILEVNGYPVGGQNDLERLQQLPEAEPPLCLKLAARSLRGLEAWIPPGAAEDWALASDLL

SEQ ID NO: 106 - protein, 2485 aa, Homo sapiens
MHVSLAEALEVRGGPLQEEEIWAVLNQSAESLQELFRKVSLADPAALGFIISPWSLLLLPSGSVSFTDENISNQDLRAFTAPEVLQNQSLTSLSDVEKIHIYSLGMTLYWGADYEVPQSQPIKLGDHLNSILLGMCEDVIYARVSVRTVLDACSAHIRNSNCAPSFSYVKHLVKLVLGNLSGTDQLSCNSEQKPDRSQAIRDRLRGKGLPTGRSSTSDVLDIQKPPLSHQTFLNKGLSKSMGFLSIKDTQDENYFKDILSDNSGREDSENTFSPYQFKTSGPEKKPIPGIDVLSKKKIWASSMDLLCTADRDFSSGETATYRRCHPEAVTVRTSTTPRKKEARYSDGSIALDIFGPQKMDPIYHTRELPTSSAISSALDRIRERQKKLQVLREAMNVEEPVRRYKTYHGDVFSTSSESPSIISSESDFRQVRRSEASKRFESSSGLPGVDETLSQGQSQRPSRQYETPFEGNLINQEIMLKRQEEELMQLQAKMALRQSRLSLYPGDTIKASMLDITRDPLREIALETAMTQRKLRNFFGPEFVKMTIEPFISLDLPRSILTKKGKNEDNRRKVNIMLLNGQRLELTCDTKTICKDVFDMVVAHIGLVEHHLFALATLKDNEYFFVDPDLKLTKVAPEGWKEEPKKKTKATVNFTLFFRIKFFMDDVSLIQHTLTCHQYYLQLRKDILEERMHCDDETSLLLASLALQAEYGDYQPEVHGVSYFRMEHYLPARVMEKLDLSYIKEELPKLHNTYVGASEKETELEFLKVCQRLTEYGVHFHRVHPEKKSQTGILLGVCSKGVLVFEVHNGVRTLVLRFPWRETKKISFSKKKITLQNTSDGIKHGFQTDNSKICQYLLHLCSYQHKFQLQMRARQSNQDAQDIERASFRSLNLQAESVRGFNMGRAISTGSLASSTLNKLAVRPLSVQAEILKRLSCSELSLYQPLQNSSKEKNDKASWEEKPREMSKSYHDLSQASLYPHRKNVIVNMEPPPQTVAELVGKPSHQMSRSDAESLAGVTKLNNSKSVASLNRSPERRKHESDSSSIEDPGQAYVLGMTMHSSGNSSSQVPLKENDVLHKRWSIVSSPEREITLVNLKKDAKYGLGFQIIGGEKMGRLDLGIFISSVAPGGPADLDGCLKPGDRLISVNSVSLEGVSHHAAIEILQNAPEDVTLVISQPKEKISKVPSTPVHLTNEMKNYMKKSSYMQDSAIDSSSKDHHWSRGTLRHISENSFGPSGGLREGSLSSQDSRTESASLSQSQVNGFFASHLGDQTWQESQHGSPSPSVISKATEKETFTDSNQSKTKKPGISDVTDYSDRGDSDMDEATYSSSQDHQTPKQESSSSVNTSNKMNFKTFSSSPPKPGDIFEVELAKNDNSLGISVTGGVNTSVRHGGIYVKAVIPQGAAESDGRIHKGDRVLAVNGVSLEGATHKQAVETLRNTGQVVHLLLEKGQSPTSKEHVPVTPQCTLSDQNAQGQGPEKVKKTTQVKDYSFVTEENTFEVKLFKNSSGLGFSFSREDNLIPEQINASIVRVKKLFPGQPAAESGKIDVGDVILKVNGASLKGLSQQEVISALRGTAPEVFLLLCRPPPGVLPEIDTALLTPLQSPAQVLPNSSKDSSQPSCVEQSTSSDENEMSDKSKKQCKSPSRRDSYSDSSGSGEDDLVTAPANISNSTWSSALHQTLSNMVSQAQSHHEAPKSQEDTICTMFYYPQKIPNKPEFEDSNPSPLPPDMAPGQSYQPQSESASSSSMDKYHIHHISEPTRQENWTPLKNDLENHLEDFELEVELLITLIKSEKGSLGFTVTKGNQRIGCYVHDVIQDPAKSDGRLKPGDRLIKVNDTDVTNMTHTDAVNLLRAASKTVRLVIGRVLELPRIPMLPHLLPDITLTCNKEELGFSLCGGHDSLYQVVYISDINPRSVAAIEGNLQLLDVIHYVNGVSTQGMTLEEVNRALDMSLPSLVLKATRNDLPVVPSSKRSAVSAPKSTKGNGSYSVGSCSQPALTPNDSFSTVAGEEINEISYPKGKCSTYQIKGSPNLTLPKESYIQEDDIYDDSQEAEVIQSLLDVVDEEAQNLLNENNAAGYSCGPGTLKMNGKLSEERTEDTDCDGSPLPEYFTEATKMNGCEEYCEEKVKSESLIQKPQEKKTDDDEITWGNDELPIERTNHEDSDKDHSFLTNDELAVLPVVKVLPSGKYTGANLKSVIRVLRGLLDQGIPSKELENLQELKPLDQCLIGQTKENRRKNRYKNILPYDATRVPLGDEGGYINASFIKIPVGKEEFVYIACQGPLPTTVGDFWQMIWEQKSTVIAMMTQEVEGEKIKCQRYWPNILGKTTMVSNRLRLALVRMQQLKGFVVRAMTLEDIQTREVRHISHLNFTAWPDHDTPSQPDDLLTFISYMRHIHRSGPIITHCSAGIGRSGTLICIDVVLGLISQDLDFDISDLVRCMRLQRHGMVQTEDQYIFCYQVILYVLTRLQAEEEQKQQPQLLK

SEQ ID NO: 107 - protein, 926 aa, Homo sapiens
MTSRFRLPAGRTYNVRASELARDRQHTEVVCNILLLDNTVQAFKVNKHDQGQVLLDVVFKHLDLTEQDYFGLQLADDSTDNPRWLDPNKPIRKQLKRGSPYSLNFRVKFFVSDPNKLQEEYTRYQYFLQIKQDILTGRLPCPSNTAALLASFAVQSELGDYDQSENLSGYLSDYSFIPNQPQDFEKEIAKLHQQHIGLSPAEAEFNYLNTARTLELYGVEFHYARDQSNNEIMIGVMSGGILIYKNRVRMNTFPWLKIVKISFKCKQFFIQLRKELHESRETLLGFNMVNYRACKNLWKACVEHHTFFRLDRPLPPQKNFFAHYFTLGSKFRYCGRTEVQSVQYGKEKANKDRVFARSPSKPLARKLMDWEVVSRNSISDDRLETQSLPSRSPPGTPNHRNSTFTQEGTRLRPSSVGHLVDHMVHTSPSEVFVNQRSPSSTQANSIVLESSPSQETPGDGKPPALPPKQSKKNSWNQIHYSHSQQDLESHINETFDIPSSPEKPTPNGGIPHDNLVLIRMKPDENGRFGFNVKGGYDQKMPVIVSRVAPGTPADLCVPRLNEGDQVVLINGRDIAEHTHDQVVLFIKASCERHSGELMLLVRPNAVYDVVEEKLENEPDFQYIPEKAPLDSVHQDDHSLRESMIQLAEGLITGTVLTQFDQLYRKKPGMTMSCAKLPQNISKNRYRDISPYDATRVILKGNEDYINANYINMEIPSSSIINQYIACQGPLPHTCTDFWQMTWEQGSSMVVMLTTQVERGRVKCHQYWPEPTGSSSYGCYQVTCHSEEGNTAYIFRKMTLFNQEKNESRPLTQIQYIAWPDHGVPDDSSDFLDFVCHVRNKRAGKEEPVVVHCSAGIGRTGVLITMETAMCLIECNQPVYPLDIVRTMRDQRAMMIQTPSQYRFVCEAILKVYEEGFVKPLTTSTNK

SEQ ID NO: 108 - protein, 675 aa, Homo sapiens
MTTSHMNGHVTEESDSEVKNVDLASPEEHQKHREMAVDCPGDLGTRMMPIRRSAQLERIRQQQEDMRRRREEEGKKQELDLNSSMRLKKLAQIPPKTGIDNPMFDTEEGIVLESPHYAVKILEIEDLFSSLKHIQHTLVDSQSQEDISLLLQLVQNKDFQNAFKIHNAITVHMNKASPPFPLISNAQDLAQEVQTVLKPVHHKEGQELTALLNTPHIQALLLAHDKVAEQEMQLEPITDERVYESIGQYGGETVKIVRIEKARDIPLGATVRNEMDSVIISRIVKGGAAEKSGLLHEGDEVLEINGIEIRGKDVNEVFDLLSDMHGTLTFVLIPSQQIKPPPAKETVIHVKAHFDYDPSDDPYVPCRELGLSFQKGDILHVISQEDPNWWQAYREGDEDNQPLAGLVPGKSFQQQREAMKQTIEEDKEPEKSGKLWCAKKNKKKRKKVLYNANKNDDYDNEEILTYEEMSLYHQPANRKRPIILIGPQNCGQNELRQRLMNKEKDRFASAVPHTTRSRRDQEVAGRDYHFVSRQAFEADIAAGKFIEHGEFEKNLYGTSIDSVRQVINSGKICLLSLRTQSLKTLRNSDLKPYIIFIAPPSQERLRALLAKEGKNPKPEELREIIEKTREMEQNNGHYFDTAIVNSDLDKAYQELLRLINKLDTEPQWVPSTWLR

SEQ ID NO: 109 - protein, 2161 aa, Homo sapiens
MTHSPATSEDEERHSASECPEGGSESDSSPDGPGRGPRGTRGQGSGAPGSLASVRGLQGRSMSVPDDAHFSMMVFRIGIPDLHQTKCLRFNPDATIWTAKQQVLCALSESLQDVLNYGLFQPATSGRDANFLEEERLLREYPQSFEKGVPYLEFRYKTRVYKQTNLDEKQLAKLHTKTGLKKFLEYVQLGTSDKVARLLDKGLDPNYHDSDSGETPLTLAAQTEGSVEVIRTLCLGGAHIDFRARDGMTALHKAACARHCLALTALLDLGGSPNYKDRRGLTPLFHTAMVGGDPRCCELLLFNRAQLGIADENGWQEIHQACQRGHSQHLEHLLFYGAEPGAQNASGNTALHICALYNKETCARILLYRGADKDVKNNNGQTPFQVAVIAGNFELGELIRNHREQDVVPFQESPKYAARRRGPPGTGLTVPPALLRANSDTSMALPDWMVFSAPGAASSGAPGPTSGSQGQSQPSAPTTKLSSGTLRSASSPRGARARSPSRGRHPEDAKRQPRGRPSSSGTPREGPAGGTGGSGGPGGSLGSRGRRRKLYSAVPGRSFMAVKSYQAQAEGEISLSKGEKIKVLSIGEGGFWEGQVKGRVGWFPSDCLEEVANRSQESKQESRSDKAKRLFRHYTVGSYDSFDAPSLMDGIGPGSDYIIKEKTVLLQKKDSEGFGFVLRGAKAQTPIEEFTPTPAFPALQYLESVDEGGVAWRAGLRMGDFLIEVNGQNVVKVGHRQVVNMIRQGGNTLMVKVVMVTRHPDMDEAVHKKAPQQAKRLPPPTISLRSKSMTSELEEMEYEQQPAPVPSMEKKRTVYQMALNKLDEILAAAQQTISASESPGPGGLASLGKHRPKGFFATESSFDPHHRAQPSYERPSFLPPGPGLMLRQKSIGAAEDDRPYLAPPAMKFSRSLSVPGSEDIPPPPTTSPPEPPYSTPPVPSSSGRLTPSPRGGPFNPGSGGPLPASSPASFDGPSPPDTRVGSREKSLYHSGPLPPAHHHPPHHHHHHAPPPQPHHHHAHPPHPPEMETGGSPDDPPPRLALGPQPSLRGWRGGGPSPTPGAPSPSHHGSAGGGGGSSQGPALRYFQLPPRAASAAMYVPARSGRGRKGPLVKQTKVEGEPQKGGGLPPAPSPTSPASPQPPPAVAAPSEKNSIPIPTIIIKAPSTSSSGRSSQGSSTEAEPPTQPEPTGGGGGGGSSPSPAPAMSPVPPSPSPVPTPASPSGPATLDFTSQFGAALVGAARREGGWQNEARRRSTLFLSTDAGDEDGGDGGLGTGAAPGPRLRHSKSIDEGMFSAEPYLRLESAGSGAGYGGYGAGSRAYGGGGGSSAFTSFLPPRPLVHPLTGKALDPASPLGLALAARERALKESSEGGGAPQPPPRPPSPRYEAPPPTPHHHSPHAHHEPVLRLWGASPPDPARRELGYRAGLGSQEKSLPASPPAARRSLLHRLPPTAPGVGPLLLQLGTEPPAPHPGVSKPWRSAAPEEPERLPLHVRFLENCQPRAPVTSGRGPPSEDGPGVPPPSPRRSVPPSPTSPRASEENGLPLLVLPPPAPSVDVEDGEFLFVEPLPPPLEFSNSFEKPESPLTPGPPHPLPDTPAPATPLPPVPPPAVAAAPPTLDSTASSLTSYDSEVATLTQGASAAPGDPHPPGPPAPAAPAPAAPQPGPDPPPGTDSGIEEVDSRSSSDHPLETISSASTLSSLSAEGGGSAGGGGGAGAGVASGPELLDTYVAYLDGQAFGGSSTPGPPYPPQLMTPSKLRGRALGASGGLRPGPSGGLRDPVTPTSPTVSVTGAGTDGLLALRACSGPPTAGVAGGPVAVEPEVPPVPLPTASSLPRKLLPWEEGPGPPPPPLPGPLAQPQASALATVKASIISELSSKLQQFGGSSAAGGALPWARGGSGGGGDSHHGGASYVPERTSSLQRQRLSDDSQSSLLSKPVSSLFQNWPKPPLPPLPTGTGVSPTAAAAPGATSPSASSSSTSTRHLQGVEFEMRPPLLRRAPSPSLLPASEHKVSPAPRPSSLPILPSGPLYPGLFDIRGSPTGGAGGSADPFAPVFVPPHPGISGGLGGALSGASRSLSPTRLLSLPPDKPFGAKPLGFWTKFDVADWLEWLGLAEHRAQFLDHEIDGSHLPALTKEDYVDLGVTRVGHRMNIDRALKFFLER

SEQ ID NO: 110 - protein, 1849 aa, Homo sapiens
MPRSPTSSEDEMAQSFSDYSVGSESDSSKEETIYDTIRATAEKPGGARTEESQGNTLVIRVVIHDLQQTKCIRFNPDATVWVAKQRILCTLTQSLKDVLNYGLFQPASNGRDGKFLDEERLLREYPQPVGEGVPSLEFRYKKRVYKQASLDEKQLAKLHTKTNLKKCMDHIQHRLVEKITKMLDRGLDPNFHDPETGETPLTLAAQLDDSVEVIKALKNGGAHLDFRAKDGMTALHKAARARNQVALKTLLELGASPDYKDSYGLTPLYHTAIVGGDPYCCELLLHEHATVCCKDENGWHEIHQACRYGHVQHLEHLLFYGADMSAQNASGNTALHICALYNQDSCARVLLFRGGNKELKNYNSQTPFQVAIIAGNFELAEYIKNHKETDIVPFREAPAYSNRRRRPPNTLAAPRVLLRSNSDNNLNASAPDWAVCSTATSHRSLSPQLLQQMPSKPEGAAKTIGSYVPGPRSRSPSLNRLGGAGEDGKRPQPLWHVGSPFALGANKDSLSAFEYPGPKRKLYSAVPGRLFVAVKPYQPQVDGEIPLHRGDRVKVLSIGEGGFWEGSARGHIGWFPAECVEEVQCKPRDSQAETRADRSKKLFRHYTVGSYDSFDTSSDCIIEEKTVVLQKKDNEGFGFVLRGAKADTPIEEFTPTPAFPALQYLESVDEGGVAWQAGLRTGDFLIEVNNENVVKVGHRQVVNMIRQGGNHLVLKVVTVTRNLDPDDTARKKAPPPPKRAPTTALTLRSKSMTSELEELVDKASVRKKKDKPEEIVPASKPSRAAENMAVEPRVATIKQRPSSRCFPAGSDMNSVYERQGIAVMTPTVPGSPKAPFLGIPRGTMRRQKSIDSRIFLSGITEEERQFLAPPMLKFTRSLSMPDTSEDIPPPPQSVPPSPPPPSPTTYNCPKSPTPRVYGTIKPAFNQNSAAKVSPATRSDTVATMMREKGMYFRRELDRYSLDSEDLYSRNAGPQANFRNKRGQMPENPYSEVGKIASKAVYVPAKPARRKGMLVKQSNVEDSPEKTCSIPIPTIIVKEPSTSSSGKSSQGSSMEIDPQAPEPPSQLRPDESLTVSSPFAAAIAGAVRDREKRLEARRNSPAFLSTDLGDEDVGLGPPAPRTRPSMFPEEGDFADEDSAEQLSSPMPSATPREPENHFVGGAEASAPGEAGRPLNSTSKAQGPESSPAVPSASSGTAGPGNYVHPLTGRLLDPSSPLALALSARDRAMKESQQGPKGEAPKADLNKPLYIDTKMRPSLDAGFPTVTRQNTRGPLRRQETENKYETDLGRDRKGDDKKNMLIDIMDTSQQKSAGLLMVHTVDATKLDNALQEEDEKAEVEMKPDSSPSEVPEGVSETEGALQISAAPEPTTVPGRTIVAVGSMEEAVILPFRIPPPPLASVDLDEDFIFTEPLPPPLEFANSFDIPDDRAASVPALSDLVKQKKSDTPQSPSLNSSQPTNSADSKKPASLSNCLPASFLPPPESFDAVADSGIEEVDSRSSSDHHLETTSTISTVSSISTLSSEGGENVDTCTVYADGQAFMVDKPPVPPKPKMKPIIHKSNALYQDALVEEDVDSFVIPPPAPPPPPGSAQPGMAKVLQPRTSKLWGDVTEIKSPILSGPKANVISELNSILQQMNREKLAKPGEGLDSPMGAKSASLAPRSPEIMSTISGTRSTTVTFTVRPGTSQPITLQSRPPDYESRTSGTRRAPSPVVSPTEMNKETLPAPLSAATASPSPALSDVFSLPSQPPSGDLFGLNPAGRSRSPSPSILQQPISNKPFTTKPVHLWTKPDVADWLESLNLGEHKEAFMDNEIDGSHLPNLQKEDLIDLGVTRVGHRMNIERALKQLLDR

SEQ ID NO: 111 - protein, 358 aa, Homo sapiens
MSADAAAGAPLPRLCCLEKGPNGYGFHLHGEKGKLGQYIRLVEPGSPAEKAGLLAGDRLVEVNGENVEKETHQQVVSRIRAALNAVRLLVVDPETDEQLQKLGVQVREELLRAQEAPGQAEPPAAAEVQGAGNENEPREADKSHPEQRELRPRLCTMKKGPSGYGFNLHSDKSKPGQFIRSVDPDSPAEASGLRAQDRIVEVNGVCMEGKQHGDVVSAIRAGGDETKLLVVDRETDEFFKKCRVIPSQEHLNGPLPVPFTNGEIQKENSREALAEAALESPRPALVRSASSDTSEELNSQDSPPKQDSTAPSSTSSSDPILDFNISLAMAKERAHQKRSSKRAPQMDWSKKNELFSNL

SEQ ID NO: 112 - protein, 233 aa, Homo sapiens
MLKPSVTSAPTADMATLTVVQPLTLDRDVARAIELLEKLQESGEVPVHKLQSLKKVLQSEFCTAIREVYQYMHETITVNGCPEFRARATAKATVAAFAASEGHSHPRVVELPKTDEGLGFNVMGGKEQNSPIYISRIIPGGVAERHGGLKRGDQLLSVNGVSVEGEHHEKAVELLKAAKDSVKLVVRYTPKVLEEMEARFEKLRTARRRQQQQLLIQQQQQQQQQQTQQNHMS

SEQ ID NO: 113 - protein, 197 aa, Homo sapiens
MAALGEPVRLERDICRAIELLEKLQRSGEVPPQKLQALQRVLQSEFCNAVREVYEHVYETVDISSSPEVRANATAKATVAAFAASEGHSHPRVVELPKTEEGLGFNIMGGKEQNSPIYISRIIPGGIADRHGGLKRGDQLLSVNGVSVEGEHHEKAVELLKAAQGKVKLVVRYTPKVLEEMESRFEKMRSAKRRQQT

SEQ ID NO: 114 - protein, 1748 aa, Homo sapiens
MSARAAAAKSTAMEETAIWEQHTVTLHRAPGFGFGIAISGGRDNPHFQSGETSIVISDVLKGGPAEGQLQENDRVAMVNGVSMDNVEHAFAVQQLRKSGKNAKITIRRKKKVQIPVSRPDPEPVSDNEEDSYDEEIHDPRSGRSGVVNRRSEKIWPRDRSASRERSLSPRSDRRSVASSQPAKPTKVTLVKSRKNEEYGLRLASHIFVKEISQDSLAARDGNIQEGDVVLKINGTVTENMSLTDAKTLIERSKGKLKMVVQRDERATLLNVPDLSDSIHSANASERDDISEIQSLASDHSGRSHDRPPRRSRSRSPDQRSEPSDHSRHSPQQPSNGSLRSRDEERISKPGAVSTPVKHADDHTPKTVEEVTVERNEKQTPSLPEPKPVYAQVGQPDVDLPVSPSDGVLPNSTHEDGILRPSMKLVKFRKGDSVGLRLAGGNDVGIFVAGVLEDSPAAKEGLEEGDQILRVNNVDFTNIIREEAVLFLLDLPKGEEVTILAQKKKDVYRRIVESDVGDSFYIRTHFEYEKESPYGLSFNKGEVFRVVDTLYNGKLGSWLAIRIGKNHKEVERGIIPNKNRAEQLASVQYTLPKTAGGDRADFWRFRGLRSSKRNLRKSREDLSAQPVQTKFPAYERVVLREAGFLRPVTIFGPIADVAREKLAREEPDIYQIAKSEPRDAGTDQRSSGIIRLHTIKQIIDQDKHALLDVTPNAVDRLNYAQWYPIVVFLNPDSKQGVKTMRMRLCPESRKSARKLYERSHKLRKNNHHLFTTTINLNSMNDGWYGALKEAIQQQQNQLVWVSEGKADGATSDDLDLHDDRLSYLSAPGSEYSMYSTDSRHTSDYEDTDTEGGAYTDQELDETLNDEVGTPPESAITRSSEPVREDSSGMHHENQTYPPYSPQAQPQPIHRIDSPGFKPASQQKAEASSPVPYLSPETNPASSTSAVNHNVNLTNVRLEEPTPAPSTSYSPQADSLRTPSTEAAHIMLRDQEPSLSSHVDPTKVYRKDPYPEEMMRQNHVLKQPAVSHPGHRPDKEPNLTYEPQLPYVEKQASRDLEQPTYRYESSSYTDQFSRNYEHRLRYEDRVPMYEEQWSYYDDKQPYPSRPPFDNQHSQDLDSRQHPEESSERGYFPRFEEPAPLSYDSRPRYEQAPRASALRHEEQPAPGYDTHGRLRPEAQPHPSAGPKPAESKQYFEQYSRSYEQVPPQGFTSRAGHFEPLHGAAAVPPLIPSSQHKPEALPSNTKPLPPPPTQTEEEEDPAMKPQSVLTRVKMFENKRSASLETKKDVNDTGSFKPPEVASKPSGAPIIGPKPTSQNQFSEHDKTLYRIPEPQKPQLKPPEDIVRSNHYDPEEDEEYYRKQLSYFDRRSFENKPPAHIAASHLSEPAKPAHSQNQSNFSSYSSKGKPPEADGVDRSFGEKRYEPIQATPPPPPLPSQYAQPSQPVTSASLHIHSKGAHGEGNSVSLDFQNSLVSKPDPPPSQNKPATFRPPNREDTAQAAFYPQKSFPDKAPVNGTEQTQKTVTPAYNRFTPKPYTSSARPFERKFESPKFNHNLLPSETAHKPDLSSKTPTSPKTLVKSHSLAQPPEFDSGVETFSIHAEKPKYQINNISTVPKAIPVSPSAVEEDEDEDGHTVVATARGIFNSNGGVLSSIETGVSIIIPQGAIPEGVEQEIYFKVCRDNSILPPLDKEKGETLLSPLVMCGPHGLKFLKPVELRLPHCDPKTWQNKCLPGDPNYLVGANCVSVLIDHF

SEQ ID NO: 115 - protein, 396 aa, Homo sapiens
MSWSFLTRLLEEIHNHSTFVGKIWLTVLIVFRIVLTAVGGESIYYDEQSKFVCNTEQPGCENVCYDAFAPLSHVRFWVFQIILVATPSVMYLGYAIHKIAKMEHGEADKKAARSKPYAMRWKQHRALEETEEDNEEDPMMYPEMELESDKENKEQSQPKPKHDGRRRIREDGLMKIYVLQLLARTVFEVGFLIGQYFLYGFQVHPFYVCSRLPCPHKIDCFISRPTEKTIFLLIMYGVTGLCLLLNIWEMLHLGFGTIRDSLNSKRRELEDPGAYNYPFTWNTPSAPPGYNIAVKPDQIQYTELSNAKIAYKQNKANTAQEQQYGSHEENLPADLEALQREIRMAQERLDLAVQAYSHQNNPHGPREKKAKVGSKAGSNKSTASSKSGDGKTSVWI

SEQ ID NO: 116 - protein, 800 aa, Homo sapiens
MNYIFGNNTLLYSRGSRGGNTSSSHGSAGPKQKHWAKKGSSDELQAEPEPSRWQQIVAFFTRRHSFIDCISVATSSTQANPPPVLVNTDSLETPTYVNGTDADYEYEEITLERGNSGLGFSIAGGTDNPHIGDDSSIFITKIITGGAAAQDGRLRVNDCILRVNEVDVRDVTHSKAVEALKEAGSIVRLYVKRRKPVSEKIMEIKLIKGPKGLGFSIAGGVGNQHIPGDNSIYVTKIIEGGAAHKDGKLQIGDKLLAVNNVCLEEVTHEEAVTALKNTSDFVYLKVAKPTSMYMNDGYAPPDITNSSSQPVDNHVSPSSFLGQTPASPARYSPVSKAVLGDDEITREPRKVVLHRGSTGLGFNIVGGEDGEGIFISFILAGGPADLSGELRKGDRIISVNSVDLRAASHEQAAAALKNAGQAVTIVAQYRPEEYSRFEAKIHDLREQMMNSSISSGSGSLRTSQKRSLYVRALFDYDKTKDSGLPSQGLNFKFGDILHVINASDDEWWQARQVTPDGESDEVGVIPSKRRVEKKERARLKTVKFNSKTRDKGEIPDDMGSKGLKHVTSNASDSESSYLILITDEYGCSKGGQEEYVLSYEPVNQQEVNYTRPVIILGPMKDRINDDLISEFPDKFGSCVPHTTRPKRDYEVDGRDYHFVTSREQMEKDIQEHKFIEAGQYNNHLYGTSVQSVREVAEKGKHCILDVSGNAIKRLQIAQLYPISIFIKPKSMENIMEMNKRLTEEQARKTFERAMKLEQEFTEHFTAIVQGDTLEDIYNQVKQIIEEQSGSYIWVPAKEKL

SEQ ID NO: 117 - protein, 2041 aa, Homo sapiens
MLEAIDKNRALHAAERLQTKLRERGDVANEDKLSLLKSVLQSPLFSQILSLQTSVQQLKDQVNIATSATSNIEYAHVPHLSPAVIPTLQNESFLLSPNNGNLEALTGPGIPHINGKPACDEFDQLIKNMAQGRHVEVFELLKPPSGGLGFSVVGLRSENRGELGIFVQEIQEGSVAHRDGRLKETDQILAINGQALDQTITHQQAISILQKAKDTVQLVIARGSLPQLVSPIVSRSPSAASTISAHSNPVHWQHMETIELVNDGSGLGFGIIGGKATGVIVKTILPGGVADQHGRLCSGDHILKIGDTDLAGMSSEQVAQVLRQCGNRVKLMIARGAIEERTAPTALGITLSSSPTSTPELRVDASTQKGEESETFDVELTKNVQGLGITIAGYIGDKKLEPSGIFVKSITKSSAVEHDGRIQIGDQIIAVDGTNLQGFTNQQAVEVLRHTGQTVLLTLMRRGMKQEAELMSREDVTKDADLSPVNASIIKENYEKDEDFLSSTRNTNILPTEEEGYPLLSAEIEEIEDAQKQEAALLTKWQRIMGINYEIVVAHVSKFSENSGLGISLEATVGHHFIRSVLPEGPVGHSGKLFSGDELLEVNGITLLGENHQDVVNILKELPIEVTMVCCRRTVPPTTQSELDSLDLCDIELTEKPHVDLGEFIGSSETEDPVLAMTDAGQSTEEVQAPLAMWEAGIQHIELEKGSKGLGFSILDYQDPIDPASTVIIIRSLVPGGIAEKDGRLLPGDRLMFVNDVNLENSSLEEAVEALKGAPSGTVRIGVAKPLPLSPEEGYVSAKEDSFLYPPHSCEEAGLADKPLFRADLALVGTNDADLVDESTFESPYSPENDSIYSTQASILSLHGSSCGDGLNYGSSLPSSPPKDVIENSCDPVLDLHMSLEELYTQNLLQRQDENTPSVDISMGPASGFTINDYTPANAIEQQYECENTIVWTESHLPSEVISSAELPSVLPDSAGKGSEYLLEQSSLACNAECVMLQNVSKESFERTINIAKGNSSLGMTVSANKDGLGMIVRSIIHGGAISRDGRIAIGDCILSINEESTISVTNAQARAMLRRHSLIGPDIKITYVPAEHLEEFKISLGQQSGRVMALDIFSSYTGRDIPELPEREEGEGEESELQNTAYSNWNQPRRVELWREPSKSLGISIVGGRGMGSRLSNGEVMRGIFIKHVLEDSPAGKNGTLKPGDRIVEVDGMDLRDASHEQAVEAIRKAGNPVVFMVQSIINRPRKSPLPSLLHNLYPKYNFSSTNPFADSLQINADKAPSQSESEPEKAPLCSVPPPPPSAFAEMGSDHTQSSASKISQDVDKEDEFGYSWKNIRERYGTLTGELHMIELEKGHSGLGLSLAGNKDRSRMSVFIVGIDPNGAAGKDGRLQIADELLEINGQILYGRSHQNASSIIKCAPSKVKIIFIRNKDAVNQMAVCPGNAVEPLPSNSENLQNKETEPTVTTSDAAVDLSSFKNVQHLELPKDQGGLGIAISEEDTLSGVIIKSLTEHGVAATDGRLKVGDQILAVDDEIVVGYPIEKFISLLKTAKMTVKLTIHAENPDSQAVPSAAGAASGEKKNSSQSLMVPQSGSPEPESIRNTSRSSTPAIFASDPATCPIIPGCETTIEISKGRTGLGLSIVGGSDTLLGAIIIHEVYEEGAACKDGRLWAGDQILEVNGIDLRKATHDEAINVLRQTPQRVRLTLYRDEAPYKEEEVCDTLTIELQKKPGKGLGLSIVGKRNDTGVFVSDIVKGGIADADGRLMQGDQILMVNGEDVRNATQEAVAALLKVSEGSLSSFTFPLSGSSTSESLESSSKKNALASEIQGLRTVEMKKGPTDSLGISIAGGVGSPLGDVPIFIAMMHPTGVAAQTQKLRVGDRIVTICGTSTEGMTHTQAVNLLKNASGSIEMQVVAGGDVSVVTGHQQEPASSSLSFTGLTSSSIFQDDLGPPQCKSITLERGPDGLGFSIVGGYGSPHGDLPIYVKTVFAKGAASEDGRLKRGDQIIAVNGQSLEGVTHEEAVAILKRTKGTVTLMVLS

SEQ ID NO: 118 - protein, 1544 aa, Homo sapiens
MSGTQSTITDRFPLKKPIRHGSILNRESPTDKKQKVERIASHDFDPTDSSSKKTKSSSEESRSEIYGLVQRCVIIQKDDNGFGLTVSGDNPVFVQSVKEDGAAMRAGVQTGDRIIKVNGTLVTHSNHLEVVKLIKSGSYVALTVQGRPPGSPQIPLADSEVEPSVIGHMSPIMTSPHSPGASGNMERITSPVLMGEENNVVHNQKVEILRKMLQKEQERLQLLQEDYNRTPAQRLLKEIQEAKKHIPQLQEQLSKATGSAQDGAVVTPSRPLGDTLTVSEAETDPGDVLGRTDCSSGDASRPSSDNADSPKSGPKERIYLEENPEKSETIQDTDTQSLVGSPSTRIAPHIIGAEDDDFGTEHEQINGQCSCFQSIELLKSRPAHLAVFLHHVVSQFDPATLLCYLYSDLYKHTNSKETRRIFLEFHQFFLDRSAHLKVSVPDEMSADLEKRRPELIPEDLHRHYIQTMQERVHPEVQRHLEDFRQKRSMGLTLAESELTKLDAERDKDRLTLEKERTCAEQIVAKIEEVLMTAQAVEEDKSSTMQYVILMYMKHLGVKVKEPRNLEHKRGRIGFLPKIKQSMKKDKEGEEKGKRRGFPSILGPPRRPSRHDNSAIGRAMELQKARHPKHLSTPSSVSPEPQDSAKLRQSGLANEGTDAGYLPANSMSSVASGASFSQEGGKENDTGSKQVGETSAPGDTLDGTPRTLNTVFDFPPPPLDQVQEEECEVERVTEHGTPKPFRKFDSVAFGESQSEDEQFENDLETDPPNWQQLVSREVLLGLKPCEIKRQEVINELFYTERAHVRTLKVLDQVFYQRVSREGILSPSELRKIFSNLEDILQLHIGLNEQMKAVRKRNETSVIDQIGEDLLTWFSGPGEEKLKHAAATFCSNQPFALEMIKSRQKKDSRFQTFVQDAESNPLCRRLQLKDIIPTQMQRLTKYPLLLDNIAKYTEWPTEREKVKKAADHCRQILNYVNQAVKEAENKQRLEDYQRRLDTSSLKLSEYPNVEELRNLDLTKRKMIHEGPLVWKVNRDKTIDLYTLLLEDILVLLQKQDDRLVLRCHSKILASTADSKHTFSPVIKLSTVLVRQVATDNKALFVISMSDNGAQIYELVAQTVSEKTVWQDLICRMAASVKEQSTKPIPLPQSTPGEGDNDEEDPSKLKEEQHGISVTGLQSPDRDLGLESTLISSKPQSHSLSTSGKSEVRDLFVAERQFAKEQHTDGTLKEVGEDYQIAIPDSHLPVSEERWALDALRNLGLLKQLLVQQLGLTEKSVQEDWQHFPRYRTASQGPQTDSVIQNSENIKAYHSGEGHMPFRTGTGDIATCYSPRTSTESFAPRDSVGLAPQDSQASNILVMDHMIMTPEMPTMEPEGGLDDSGEHFFDAREAHSDENPSEGDGAVNKEEKDVNLRISGNYLILDGYDPVQESSTDEEVASSLTLQPMTGIPAVESTHQQQHSPQNTHSDGAISPFTPEFLVQQRWGAMEYSCFEIQSPSSCADSQSQIMEYIHKIEADLEHLKKVEESYTILCQRLAGSALTDKHSDKS

SEQ ID NO: 119 - protein, 408 aa, Homo sapiens
MTSTFNPRECKLSKQEGQNYGFFLRIEKDTEGHLVRVVEKCSPAEKAGLQDGDRVLRINGVFVDKEEHMQVVDLVRKSGNSVTLLVLDGDSYEKAVKTRVDLKELGQSQKEQGLSDNILSPVMNGGVQTWTQPRLCYLVKEGGSYGFSLKTVQGQIIKDIDSGSPAEEAGLKNNDLVVAVNGESVETLDHDSVVEMIRKGGDQTSLLVVDKETDNMYRLAHFSPFLYYQSQELPNGSVKEAPAPTPTSLEVSSPPDTTEEVDHKPKLCRLAKGENGYGFHLNAIRGLPGSFIKEVQKGGPADLAGLEDEDVIIEVNGVNVLDEPYEKVVDRIQSSGKNVTLLVCGKKAYDYFQAKKIPIVSSLADPLDTPPDSKEGIVVESNHDSHMAKERAHSTASHSSSNSEDTEM

SEQ ID NO: 120 - protein, 415 aa, Homo sapiens
MFADLDYDIEEDKLGIPTVPGKVTLQKDAQNLIGISIGGGAQYCPCLYIVQVFDNTPAALDGTVAAGDEITGVNGRSIKGKTKVEVAKMIQEVKGEVTIHYNKLQADPKQGMSLDIVLKKVKHRLVENMSSGTADALGLSRAILCNDGLVKRLEELERTAELYKGMTEHTKNLLRAFYELSQTHRAFGDVFSVIGVREPQPAASEAFVKFADAHRSIEKFGIRLLKTIKPMLTDLNTYLNKAIPDTRLTIKKYLDVKFEYLSYCLKVKEMDDEEYSCIALGEPLYRVSTGNYEYRLILRCRQEARARFSQMRKDVLEKMELLDQKHVQDIVFQLQRLVSTMSKYYNDCYAVLRDADVFPIEVDLAHTTLAYGLNQEEFTDGEEEEEEEDTAAGEPSRDTRGAAGPLDKGGSWCDS

SEQ ID NO: 121 - protein, 909 aa, Homo sapiens
MNAYLTKQHSCSRGSDGMDAVRSAPTLIRDAHCACGWQRNCQGLGYSSQTMPSSGPGGPASNRTGGSSFNRTLWDSVRKSPHKTSTKGKGTCGEHCTCPHGWFSPAQASPAPIIVNTDTLDTIPYVNGTEIEYEFEEITLERGNSGLGFSIAGGTDNPHIGDDPGIFITKIIPGGAAAEDGRLRVNDCILRVNEVDVSEVSHSKAVEALKEAGSIVRLYVRRRRPILETVVEIKLFKGPKGLGFSIAGGVGNQHIPGDNSIYVTKIIDGGAAQKDGRLQVGDRLLMVNNYSLEEVTHEEAVAILKNTSEVVYLKVGKPTTIYMTDPYGPPDITHSYSPPMENHLLSGNNGTLEYKTSLPPISPGRYSPIPKHMLVDDDYTRPPEPVYSTVNKLCDKPASPRHYSPVECDKSFLLSAPYSHYHLGLLPDSEMTSHSQHSTATRQPSMTLQRAVSLEGEPRKVVLHKGSTGLGFNIVGGEDGEGIFVSFILAGGPADLSGELQRGDQILSVNGIDLRGASHEQAAAALKGAGQTVTIIAQYQPEDYARFEAKIHDLREQMMNHSMSSGSGSLRTNQKRSLYVRAMFDYDKSKDSGLPSQGLSFKYGDILHVINASDDEWWQARRVMLEGDSEEMGVIPSKRRVERKERARLKTVKFNAKPGVIDSKGSFNDKRKKSFIFSRKFPFYKNKEQSEQETSDPERGQEDLILSYEPVTRQEINYTRPVIILGPMKDRINDDLISEFPDKFGSCVPHTTRPKRDYEVDGRDYHFVISREQMEKDIQEHKFIEAGQYNDNLYGTSVQSVRFVAERGKHCILDVSGNAIKRLQVAQLYPIAIFIKPRSLEPLMEMNKRLTEEQAKKTYDRAIKLEQEFGEYFTAIVQGDTLEDIYNQCKLVIEEQSGPFIWIPSKEKL

SEQ ID NO: 122 - protein, 767 aa, Homo sapiens
MSQRPRAPRSALWLLAPPLLRWAPPLLTVLHSDLFQALLDILDYYEASLSESQKYRYQDEDTPPLEHSPAHLPNQANSPPVIVNTDTLEAPGYELQVNGTEGEMEYEEITLERGNSGLGFSIAGGTDNPHIGDDPSIFITKIIPGGAAAQDGRLRVNDSILFVNEVDVREVTHSAAVEALKEAGSIVRLYVMRRKPPAEKVMEIKLIKGPKGLGFSIAGGVGNQHIPGDNSIYVTKIIEGGAAHKDGRLQIGDKILAVNSVGLEDVMHEDAVAALKNTYDVVYLKVAKPSNAYLSDSYAPPDITTSYSQHLDNEISHSSYLGTDYPTAMTPTSPRRYSPVAKDLLGEEDIPREPRRIVIHRGSTGLGFNIVGGEDGEGIFISFILAGGPADLSGELRKGDQILSVNGVDLRNASHEQAAIALKNAGQTVTIIAQYKPEEYSRFEAKIHDLREQLMNSSLGSGTASLRSNPKRGFYIRALFDYDKTKDCGFLSQALSFRFGDVLHVIDASDEEWWQARRVHSDSETDDIGFIPSKRRVERREWSRLKAKDWGSSSGSQGREDSVLSYETVTQMEVHYARPIIILGPTKDRANDDLLSEFPDKFGSCVPHTTRPKREYEIDGRDYHFVSSREKMEKDIQAHKFIEAGQYNSHLYGTSVQSVREVAEQGKHCILDVSANAVRRLQAAHLHPIAIFIRPRSLENVLEINKRITEEQARKAFDRATKLEQEFTECFSAIVEGDSFEEIYHKVKRVIEDLSGPYIWVPARERL

SEQ ID NO: 123 - protein, 505 aa, Mus musculus
MASGRRAPRTGLLELRAGAGSGAGGERWQRVLLSLAEDVLTVSPADGDPGPEPGAPREQEPAQLNGAAEPGAGPPQLPEALLLQRRRVTVRKADAGGLGISIKGGRENKMPILISKIFKGLAADQTEALFVGDAILSVNGEDLSSATHDEAVQVLKKTGKEVVLEVKYMKDVSPYFKNSTGGTSVGWDSPPASPLQRQPSSPGPTPRNFSEAKHMSLKMAYVSKRCTPNDPEPRYLEICSADGQDTLFLRAKDEASARSWATAIQAQVNTLTPRVKDELQALLAATSTAGSQDIKQIGWLTEQLPSGGTAPTLALLTEKELLLYLSLPETREALSRPARTAPLIATRLVHSGPSKGSVPYDAELSFALRTGTRHGVDTHLFSVESPQELAAWTRQLVDGCHRAAEGVQEVSTACTWNGRPCSLSVHIDKGFTLWAAEPGAARAVLLRQPFEKLQMSSDDGASLLFLDFGGAEGEIQLDLHSCPKTIVFIIHSFLSAKVTRLGLLA

SEQ ID NO: 124 - protein, 540 aa, Mus musculus
MRVAAATAAAGAGPAMAVWTRATKAGLVELLLRERWVRVVAELSGESLSLTGDAAAAELEPALGPAAAAFNGLPNGGGAGDSLPGSPSRGLGPPSPPAPPRGPAGEAGASPPVRRVRVVKQEAGGLGISIKGGRENRMPILISKIFPGLAADQSRALRLGDAILSVNGTDLRQATHDQAVQALKRAGKEVLLEVKFIREVTPYIKKPSLVSDLPWEGAAPQSPSFSGSEDSGSPKHQNSTKDRKIIPLKMCFAARNLSMPDLENRLIELHSPDSRNTLILRCKDTATAHSWFVAIHTNIMALLPQVLAELNAMLGATSTAGGSKEVKHIAWLAEQAKLDGGRQQWRPVLMAVTEKDLLLYDCMPWTRDAWASPCHSYPLVATRLVHSGSGCRSPSLGSDLTFATRTGSRQGIEMHLFRVETHRDLSSWTRILVQGCHAAAELIKEVSLGCMLNGQEVRLTIHYENGFTISRENGGSSSILYRYPFERLKMSADDGIRNLYLDFGGPEGELTMDLHSCPKPIVFVLHTFLSAKVTRMGLLV

SEQ ID NO: 125 - protein, 517 aa, Mus musculus
MDFRTACEETKTGICLLQDGNQEPFKVRLHLAKDILMIQEQDVICVSGEPFYSGERTVTIRRQTVGGFGLSIKGGAEHNIPVVVSKISKEQRAELSGLLFIGDAILQINGINVRKCRHEEVVQVLRNAGEEVTLTVSFLKRAPAFLKLPLNEDCACAPSDQSSGTSSPLCDSGLHLNYHPNNTDTLSCSSWPTSPGLRWEKRWCDLRLIPLLHSRFSQYVPGTDLSRQNAFQVIAVDGVCTGIIQCLSAEDCVDWLQAIATNISNLTKHNIKKINRNFPVNQQIVYMGWCEAREQDPLQDRVYSPTFLALRGSCLYKFLAPPVTTWDWTRAEKTFSVYEIMCKILKDSDLLDRRKQCFTVQSESGEDLYFSVELESDLAQWERAFQTATFLEVERIQCKTYACVLESHLMGLTIDFSTGFICFDAATKAVLWRYKFSQLKGSSDDGKSKIKFLFQNPDTKQIEAKELEFSNLFAVLHCIHSFFAAKVACLDPLFLGNQATASTAASSATTSKAKYTT

SEQ ID NO: 126 - protein, 539 aa, Mus musculus
MGTEGPPPPAASRGRQGCLLVPARTKTTIALLYDEESENAYDIRLKLTKEVLTIQKQDVVCVGGSHQGRNRRTVTLRRQPVGGLGLSIKGGSEHNVPVVISKIFEDQAADQTGMLFVGDAVLQVNGIHVENATHEEVVHLLRNAGDEVTITVEYLREAPAFLKLPLGSPGPSSDHSSGASSPLFDSGLHLNGNSSTTAPSSPSSPIAKDPRYEKRWLDTLSVPLSMARISRYKAGTEKLRWNAFEVLALDGVSSGILRFYTAQDGTDWLRAVSANIRELTLQNMKMANKCCSPSDQVVHMGWVNEKLQGADSSQTFRPKFLALKGPSFYVFSTPPVSTFDWVRAERTYHLCEVLFKVHKFWLTEDCWLQANLYLGLQDFDFEDQRPYCFSIVAGHGKSHVFNVELGSELAMWEKSFQRATFMEVQRTGSRTYMCSWQGEMLCFTVDFALGFTCFESKTKNVLWRFKFSQLKGSSDDGKTRVKLLFQNLDTKQIETKELEFQDLRAVLHCIHSFIAAKVASVDPGFMDSQSLARKYMYSS

SEQ ID NO: 127 - protein, 446 aa, Mus musculus
MTLKASEGESGGSMHTALSDLYLEHLLQKRSRPEAVSHPLNTVTEDMYTNGSPAPGSPAQVKGQEVRKVRLIQFEKVTEEPMGITLKLNEKQSCTVARILHGGMIHRQGSLHVGDEILEINGTNVTNHSVDQLQKAMKETKGMISLKVIPNQQSRLPALQEAGLKFATGDIIQIINKDDSNWWQGRVEGSSKESAGLIPSPELQEWRVASMAQSAPSEAPSCSPFGKKKKYKDKYLAKHSSIFDQLDVVSYEEVVRLPAFKRKTLVLIGASGVGRSHIKNALLSQNPEKFVYPVPYTTRPPRKSEEDGKEYHFISTEEMTRNISANEFLEFGSYQGNMFGTKFETVHQIHKQNKIAILDIEPQTLKIVRTAELSPFIVFIAPTDQGTQTEALQQLQKDSEAIRSQYAHYFDLSLVNNGVDETLKKLQEAFDQACSSPQWVPVSWVY

SEQ ID NO: 128 - protein, 626 aa, Mus musculus
MLNYRSCKNLWKSCVEHHTFFQAKKLLPQEKNVLSQYWTMGSRNTKKSVNNQYCKKVIGGMVWNPAMRRSLSVEHLETKSLPSRSPPITPNWRSPRLRHEIRKPRHSSADNLANEMTYITETEDVFYTYKGSLAPQDSDSEVSQNRSPHQESLSENNPAQSYLTQKSSSSVSPSSNAPGSCSPDGVDQQLLDDFHRVTKGGSTEDASQYYCDKNDNGDSYLVLIRITPDEDGKFGFNLKGGVDQKMPLVVSRINPESPADTCIPKLNEGDQIVLINGRDISEHTHDQVVMFIKASRESHSRELALVIRRRAVRSFADFKSEDELNQLFPEAIFPMCPEGGDTLEGSMAQLKKGLESGTVLIQFEQLYRKKPGLAITFAKLPQNLDKNRYKDVLPYDTTRVLLQGNEDYINASYVNMEIPAANLVNKYIATQGPLPHTCAQFWQVVWDQKLSLIVMLTTLTERGRTKCHQYWPDPPDVMNHGGFHIQCQSEDCTIAYVSREMLVTNTQTGEEHTVTHLQYVAWPDHGVPDDSSDFLEFVNYVRSLRVDSEPVLVHCSAGIGRTGVLVTMETAMCLTERNLPIYPLDIVRKMRDQRAMMVQTSSQYKFVCEAILRVYEEGLVQMLDPS

SEQ ID NO: 129 - protein, 1481 aa, Mus musculus
MSKTLKKKKHWLSKVQECAVSWAGPPGDFGAEIRGGAERGEFPYLGRLREEPGGGTCCVVSGKAPSPGDVLLEVNGTPVSGLTNRDTLAVIRHFREPIRLKTVKPGKVINKDLRHYLSLQFQKGSIDHKLQQVIRDNLYLRTIPCTTRAPRDGEVPGVDYNFISVEQFKALEESGALLESGTYDGNFYGTPKPPAEPSPFQPDPVDQVLFDNEFDAESQRKRTTSVSKMERMDSSLPEEEEDEDKEAINGSGNAENRERHSESSDWMKTVPSYNQTNSSMDFRNYMMRDETLEPLPKNWEMAYTDTGMIYFIDHNTKTTTWLDPRLCKKAKAPEDCEDGELPYGWEKIEDPQYGTYYVDHLNQKTQFENPVEEAKRKKQLGQVEIGSSKPDMEKSHFTRDPSQLKGVLVRASLKKSTMGFGFTIIGGDRPDEFLQVKNVLKDGPAAQDGKIAPGDVIVDINGNCVLGHTHADVVQMFQLVPVNQYVNLTLCRGYPLPDDSEDPVVDIVAATPVINGQSLTKGETCMNPQDFKPGAMVLEQNGKSGHTLTGDGLNGPSDASEQRVSMASSGSSQPELVTIPLIKGPKGFGFAIADSPTGQKVKMILDSQWCQGLQKGDIIKEIYHQNVQNLTHLQVVEVLKQFPVGADVPLLILRGGPPSPTKTAKMKTDKKENAGSLEAINEPIPQPMPFPPSIIRSGSPKLDPSEVYLKSKTLYEDKPPNTKDLDVFLRKQESGFGFRVLGGDGPDQSIYIGAIIPLGAAEKDGRLRAADELMCIDGIPVKGKSHKQVLDLMTTAARNGHVLLTVRRKIFYGEKQPEDDSSQAFISTQNGSPRLNRAEVPARPAPQEPYDVVLQRKENEGFGFVILTSKNKPPPGVIPHKIGRVIEGSPADRCGKLKVGDHISAVNGQSIVELSHDNIVQLIKDAGVTVTLTVIAEEEHHGPPSGTNSARQSPALQHRPMGQSQANHIPGDRSALEGEIGKDVSTSYRHSWSDHKHLAQPDTAVISVVGSRHNQNLGCYPVELERGPRGFGFSLRGGKEYNMGLFILRLAEDGPAIKDGRIHVGDQIVEINGEPTQGITHTRAIELIQAGGNKVLLLLRPGTGLIPDHGDWDINNPSSSNVIYDEQSPLPPSSHFASIFEESHVPVIEESLRVQICEKAEELKDIVPEKKSTLNENQPEIKHQSLLQKNVSKRDPPSSHGHSNKKNLLKVENGVTRRGRSVSPKKPASQHSEEHLDKIPSPLKNNPKRRPRDQSLSPSKGENKSCQVSTRAGSGQDQCRKSRGRSASPKKQQKIEGSKAPSNAEAKLLEGKSRRIAGYTGSNAEQIPDGKEKSDVIRKDAKQNQLEKSRTRSPEKKIKRMVEKSLPSKMTNKTTSKEVSENEKGKKVTTGETSSSNDKIGENVQLSEKRLKQEPEEKVVSNKTEDHKGKELEAADKNKETGRFKPESSSPVKKTLITPGPWKVPSGNKVTGTIGMAEKRQ

SEQ ID NO: 130 - protein, 896 aa, Mus musculus
MPLHVRRSSDPALTGLSTSVSDNNFSSEEPSRKNPTRWSTTAGFLKQNTAGSPKTCDRKKDENYRSLPRDPSSWSNQFQRDNARSSLSASHPMVDRWLEKQEQDEEGTEEDSSRVEPVGHADTGLENMPNFSLDDMVKLVQVPNDGGPLGIHVVPFSARGGRTLGLLVKRLEKGGKAEQENLFHENDCIVRINDGDLRNRRFEQAQHMFRQAMRARVIWFHVVPAANKEQYEQLSQREKNNYSPGRFSPDSHCVANRSVANNAPQALPRAPRLSQPPEQLDAHPRLPHSAHASTKPPAAPALAPPSVLSTNVGSVYNTKKVGKRLNIQLKKGTEGLGFSITSRDVTIGGSAPIYVKNILPRGAAIQDGRLKAGDRLIEVNGVDLAGKSQEEVVSLLRSTKMEGTVSLLVFRQEEAFHPREMNAEPSQMQTPKETKAEDEDVVLTPDGTREFLTFEVPLNDSGSAGLGVSVKGNRSKENHADLGIFVKSIINGGAASKDGRLRVNDQLIAVNGESLLGKANQEAMETLRRSMSTEGNKRGMIQLIVARRISRCNELRSPGSPAAPELPIETELDDRERRISHSLYSGIEGLDESPTRNAALSRIMGKCQLSPTVNMPHDDTVMIEDDRLPVLPPHLSDQSSSSSHDDVGFIMTEAGTWAKATISDSADCSLSPDVDPVLAFQREGFGRQSMSEKRTKQFSDASQLDFVKTRKSKSMDLGIADETKLNTVDDQRAGSPSRDVGPSLGLKKSSSLESLQTAVAEVTLNGNIPFHRPRPRIIRGRGCNESFRAAIDKSYDKPMVDDDDEGMETLEEDTEESSRSGRESVSTSSDQPSYSLERQMNGDPEKRDKTERKKDKAGKDKKKDREKEKDKLKAKKGMLKGLGDMFSLAKLKPEKR

SEQ ID NO: 131 - protein, 612 aa, Mus musculus
MVHGGFPEKIRQRYADLPGELHIIELEKDKNGLGLSLAGNKDRSRMSIFVVGINPEGPAAADGRMRIGDELLEINNQILYGRSHQNASAIIKTAPTRVKLVFIRNEDAVSQMAVAPFPELSHSPSPVEDLGGTELVSSEEESSVDAKHLPEPESSKPEDLSQVVDDNMVAEQQKESESPDSAACQIKQQTYSTQVSSSSQDSPSSPAPLCQSAHADVTGSGNFQAPLPVDPAPLSVDPATCPIVPGQEMIIEISKGRSGLGLSIVGGKDTPLDAIVIHEVYEEGAAARDGRLWAGDQILEVNGVDLRSSSHEEAITALRQTPQKVRLVVYRDEAQYRDEENLEVFLVDLQKKTGRGLGLSIVGKRSGSGVFISDIVKGGAADLDGRLIRGDQILSVNGEDMRHASQETVATILKCVQGLVQLEIGRLRAGSWAASRKTSQNSQGDQHSAHSSCRPSFAPVITSLQNLVGTKRSSDPPQKCTEEEPRTVEIIRELSDALGISIAGGKGSPLGDIPIFIAMIQANGVAARTQKLKVGDRIVSINGQPLDGLSHTDAVNLLKNAFGRIILQVVADTNISAIATQLEIMSAGSQLGSPTADRHPEDTEEQMQRTAD

SEQ ID NO: 132 - protein, 288 aa, Mus musculus
MSYSVTLTGPGPWGFRLQGGKDFNMPLTISRITPGSKAAQSQLSQGDLVVAIDGVNTDTMTHLEAQNKIKSASYNLSLTLQKSKRPIPISTTAPPIQSPLPVIPHQKVVANSPANADYQERFNPSVLKDSALSTHKPIEVKGLGGKATIIHAQYNTPISMYSQDAIMDAIAGQAQAQGSDFSGASPLASLPVKDLAVDSASPVYQAVIKTQSKPEDEADEWARRSSNLQSRSFRILAQMTGTEYMQDPDEEALRRSRERFETERNSPRFAKLRNWHHGLSAQILNVKS

SEQ ID NO: 133 - protein, 695 aa, Mus musculus
MAETKIIYHMDEEETPYLVKLPVAPERVTLADFKNVLSNRPVHAYKFFFKSMDQDFGVVKEEIFDDNAKLPCFNGRVVSWLVLAEGAHSDAGSQGTDSHTDLPPPLERTGGIGDSRPPSFHPNVASSRDGMDNETGTESMVSHRRERARRRNRDEAARTNGHPRGDRRRDLGLPPDSASTVLSSELESSSFIDSDEEDNTSRLSSSTEQSTSSRLVRKHKCRRRKQRLRQTDRASSFSSITDSTMSLNIITVTLNMERHHFLGISIVGQSNDRGDGGIYIGSIMKGGAVAADGRIEPGDMLLQVNDVNFENMSNDDAVRVLREIVSQTGPISLTVAKCWDPTPRSYFTIPRADPVRPIDPAAWLSHTAALTGALPRYGTSPCSSAITRTSSSSLTSSVPGAPQLEEAPLTVKSDMSAIVRVMQLPDSGLEIRDRMWLKITIANAVIGADVVDWLYTHVEGFKERREARKYASSMLKHGFLRHTVNKITFSEQCYYVFGDLCSNLASLNLNSGSSGASDQDTLAPLPHPSVPWPLGQGYPYQYPGPPPCFPPAYQDPGFSCGSGSAGSQQSEGSKSSGSTRSSHRTPGREERRATGAGGSGSESDHTVPSGSGSTGWWERPVSQLSRGSSPRSQASAVAPGLPPLHPLTKAYAVVGGPPGGPPVRELAAVPPELTGSRQSFQKAMGNPCEFFVDIM

SEQ ID NO: 134 - protein, 214 aa, Mus musculus
MSNYSVSLVGPAPWGFRLQGGKDFNMPLTISSLKDGGKASQAHVRIGDVVLSIDGISAQGMTHLEAQNKIKACTGSLNMTLQRASAAAKSEPVSVQKKTHVTNNPGTVKIPPKRPPRKHIVERNTEFYHIPTHSDASKKRLIEDTEDWRPRTGTTQSRSFRILAQITGTEHLTESENDNTKKAKEKIPLHVFSPKYTKLRDWHHEVSARALNVQ

SEQ ID NO: 135 - protein, 1450 aa, Mus musculus
MTTKRSLFVRLVPCRCLRGEEETVTTLDYSHCSLEQVPKEIFTFEKTLEELYLDANQIEELPKQLFNCQSLHKLSLPDNDLTTLPASIANLINLRELDVSKNGIQEFPENIKNCKVLTIVEASVNPISKLPDGFSQLLNLTQLYLNDAFLEFLPANFGRLTKLQILELRENQLKMLPKTMNRLTQLERLDLGSNEFTEVPEVLEQLSGLREFWMDGNRLTFIPGFIGSLRQLTYLDVSKNNIEMVEEGISTCENLQDFLLSSNSLQQLPETIGSLKNVTTLKIDENQLMYLPDSIGGLRSIEELDCSFNEIEALPSSIGQLTNMRTFAADHNYLQQLPPEIGNWKNITVLFLHCNKLETLPEEMGDMQKLKVINLSDNRLKNLPFSFTKLQQLTAMWLSDNQSKPLIPLQKETDTETQKMVLTNYMFPQQPRTEDVMFISDNESFNPALWEEQRKQRAQVAFECDEDKDEREAPPREGNLKRYPTPYPDELKNMVKTVQTIVHRLKDEETNEESGRDLKQHEDQQVVNKDKCVKTSESTTTKSKLDEREKYMNSVQKMSEPEAETNGGNLPVTASMKLSGNLKHIVNHDDVFEESEELSSDEEMKMAEMRPPLIESSINQPKVVALSNNKKDDAKDADSLSDEVTHNSNQNNSNCSSPSRMSDSVSLNTDSSQDTSLCSPVKQTPVDSNSKVRQEDENFNSLLQNGVNLNNSPEEKFKINDKKDFKLPEYDLNIEEQLVLIEKDIDSKATSDDSRQLDHINMNINKLVTNNIFQPEVMERSKMQDIVLGTGFLSIHPKNEAEHIENGAKFPNLESINKVNGLCEDTAPSPGRVEPQKASSSADVGISKSTEDLSPQRSGPTGAVVKSHSITNMETGGLKIYDILGDDGPQPPSAAVKIASAVDGKNIVRSKSATLLYDQPLQVFTAASSSSELLSGTKAVFKFDSNHNPEEPDIIRAATVSGPQSTPHLYGPPQYNVQYSGSATVKDTLWHPKQNPQIDPVSFPPQRLPRSESAENHSYAKHSANMNFSNHNNVRANTGYHLQQRLAPARHGEMWAISPNDRLVPAVTRTTIQRQSSVSSTASVNLGDPTRRTEGDYLSYRELHSMGRTPVMSGSQRPLSARAYSIDGPNTSRPQSARPSINEIPERTMSVSDFNYSRTSPSKRPNTRVGSEHSLLDPPGKSKVPHDWREQVLRHIEAKKLEKSMLSRSFNSNLTAVSSSHYGSSRDLHGSQGSLALSVADGRGSGGHIFRHPQTSSPGECCQDDRFMSEEQNHPSGALSHRGLPDSLMKMPLSNGQMGQPLRPQAHYSQTHHPPQASVARHPSREQLIDYLMLKVAHQPPYTHPHCSPRQGHELAKQEIRVRVEKDPELGFSISGGVGGRGNPFRPDDDGIFVTRVQPEGPASKLLQPGDKIIQANGYSFINIEHGQAVSLLKTFHNAVDLIIVREVSS

SEQ ID NO: 136 - protein, 333 aa, Mus musculus
MPLGLGRRKKAPPLVENEEAEPSRSGLGVGEPGPLGGSAAGESQMGLPPPPAALRPRLVFHTQLAHGSPTGRIEGFTNVKELYGKIAEAFRLPAAEVMFCTLNTHKVDMDKLLGGQIGLEDFIFAHVKGQRKEVEVFKSEEALGLTITDNGAGYAFIKRIKEGSVIDHIQLISVGDMIEAINGQSLLGCRHYEVARLLKELPRGRTFTLKLTEPRKAFDMISQRSAGGHPGSGPQLGTGRGTLRLRSRGPATVEDLPSAFEEKAIEKVDDLLESYMGIRDTELAATMVELGKDKRNPDELAEALDERLGDFAFPDEFVFDVWGAIGDAKVGRY

SEQ ID NO: 137 - protein, 463 aa, Mus musculus
MSAGGPCPAGAGGGPGGSSCPVGVSPGGVSMFRWLEVLEKEFDKAFVDVDLLLGEIDPDQADITYEGRQKMTSLSSCFAQLCHKAQTVSQINHKLEAQLVDLRSELTETQAEKVVLEKEVHEQLLQLHSTQLQLHAKTGQSVDSGAIKAKLSVHSVEDLERELEANKTEKVKEARLEAEVKLLRKENEALRRHIAVLQAEVYGARLAAKYLDKELAGRVQQIQLLGRDMKGPAHDKLWNQLEAEIHLHRHKTVIRACRGRNDLKRPMQAPPGHDQDSLKKSQGVGPIRKVLLLKEDHEGLGISITGGKEHGVPILISEIHPGQPADRCGGLHVGDAILAVNGVNLRDTKHKEAVTILSQQRGEIEFEVVYVAPEVDSDDENVEYEDESGHRYRLYLDELEGSGNSGASCKDSSGEMKMLQGYNKKAVRDAHENGDVGAAGESPLDDTAARAAHLHSLHQKKAY

SEQ ID NO: 138 - protein, 1171 aa, Mus musculus
MSKVIQKKNHWTGRVHECTVKRGPQGELGVTVLGGAEHGEFPYVGAVAAAEAAGLPGGGEGPKLAEGELLLEVQGVRVSGLPRYDVLGVIDSCKEAVTFKAVRQGGRLNKDLRHFLNQRFQKGSPDHELQQTIRDNLYRHAVPCTTRSPREGEVPGVDYSFLTVKEFLDLEQSGTLLEVGTYEGNYYGTPKPPSQPVSGKVITTDALHSLQSGSKQSTPKRTKSYNDMQNAGIVHPENEEEEDVPEMNSSFTADSGDQDEHTLQEATLPPVNSSILAAPITDPSQKFPQYLPLSAEDNLGPLPENWEMAYTENGEVYFIDHNTKTTSWLDPRCLNKQQKPLEECEDDELPAGWEKIEDPVYGVYYVDHINRKTQYENPVLEAKRKKQLEQQQQQQQPQPPQPEEWTEDHASVVPPVAPSHPPSNPEPARETPLQGKPFFTRNPSELKGKFIHTKLRKSSRGFGFTVVGGDEPDEFLQIKSLVLDGPAALDGKMETGDVIVSVNDTCVLGHTHAQVVKIFQSIPIGASVDLELCRGYPLPFDPDDPNTSLVTSVAILDKEPIIVNGQETYDSPASHSSKTGKVSSMKDARPSSPADVASNSSHGYPNDTVSLASSIATQPELITVHIVKGPMGFGFTIADSPGGGGQRVKQIVDSPRCRGLKEGDLIVEVNKKNVQALTHNQVVDMLIECPKGSEVTLLVQRGGLPVPKKSPKSPLERKDSQNSSQHSVSSHRSLHTASPSHGIQVLPEYLPADAPAPDQTDSSGQKKPDPFKIWAQSRSMYENRLPDYQEQDIFLWRKETGFGFRILGGNEPGEPIYIGHIVPLGAADTDGRLRSGDELICVDGTPVIGKSHQLVVQLMQQAAKQGHVNLTVRRKVVFAVPKAENEVPSPASSHHSSNQPASLTEEKRTPQGSQNSLNTVSSGSGSTSGIGSGGGGGSGVVSAVLQPYDVEIRRGENEGFGFVIVSSVSRPEAGTTFESSNATLLTNAEKIATITTTHAPSQQGTQETRTTTKPKQDSQFEFKGPQAAQEQDFYTVELERGAKGFGFSLRGGREYNMDLYVLRLAEDGPAERCGKMRIGDEILEINGETTKNMKHSRAIELIKNGGRRVRLFLRRGDGSVPEYAMIPPKIAACMRNEKLGEACFYLMGHNQTTTPAATGTAPPPVHKVFRK

SEQ ID NO: 139 - protein, 111 aa, Mus musculus
MGGKEQNSPIYISRIIPGGVAERHGGLKRGDQLLSVNGVSVEGEHHEKAVELLKAAKDSVKLVVRYTPKVLEEMEARFEKLRTARRRQQQQLLIQQQQQQQQQQPQQNHMS

SEQ ID NO: 140 - protein, 207 aa, Mus musculus
MAALVEPLGLERDVSRAVELLERLQRSGELPPQKLQALQRVLQSRFCSAIREVYEQLYDTLDITGSAEVRAHATAKATVAAFTASEGHAHPRVVELPKTDEGLGFNIMGGKEQNSPIYISRVIPGGVADRHGGLKRGDQLLSVNGVSVEGEHHEKAVELLKAAQGSVKLVVRYTPRVLEEMEARFEKMRSARRRQQHHSYTSLESRG

SEQ ID NO: 141 - protein, 1745 aa, Mus musculus
MSARAAAAKSTAMEETAIWEQHTVTLHRAPGFGFGIAISGGRDNPHFQSGETSIVISDVLKGGPAEGQLQENDRVAMVNGVSMDNVEHAFAVQQLRKSGKNAKITIRRKKKVQIPVSHPDPEPVSDNEDDSYDEEVHDPRAGRGALANRRSEKSWARDRSASRERSLSPRSDRRSVASSQPAKPTKVTLVKSRKNEEYGLRLASHIFVKEISQDSLAARDGNIQEGDVVLKINGTVTENMSLTDAKTLIERSKGKLKMVVQRDERATLLNVPDLSDSIHSANASERDDISEIQSLASDHSGRSHDRPPRRSQSRSPDQRSEPSDHSTQSPQQPSNGSLRSREEERMSKPGAISTPVKHVDDHPPKAVEEVTVEKNEKQTPTLPEPKPVYAQVGQPDVDLPVSPSDGALPNSAHEDGILRPSMKLVKFRKGDSVGLRLAGGNDVGIFVAGVLEDSPAAKEGLEEGDQILRVNNVDFTNIIREEAVLFLLDLPKGEEVTILAQKKKDVYRRIVESDVGDSFYIRTHFEYEKESPYGLSFNKGEVFRVVDTLYNGKLGSWLAIRIGKNHKEVERGIIPNKNRAEQLASVQYTLPKTAGGDRADFWRFRGLRSSKRNLRKSREDLSAQPVQTKFPAYERVVLREAGFLRPVTIFGPIADVAREKLAREEPDIYQIAKSEPRDAGTDHRSSGIIRLHTIKQIIDQDKHALLDVTPNAVDRLNYAQWYPIVVFLNPDSKQGVKTMRMRLCPESRKSARKLYERSHKLRKNNHHLFTTTINLNSMNDGWYGALKEAIQQQQNQLVWVSEGKADGATSDDLDLHDDRLSYLSAPGSEYSMYSTDSRHTSDYEDTDTEGGAYTDQELDETLNDEVGTPPESAITRSSEPVREDSSGMHHENQTYPPYSPQAQPQAIHRIDSPGLKPASQQKAEASSPVPYLSPETTPASSASAVNHNVSVTNVSLEEPAPAPPTSHASQPGCLGAPSAEAAHVVLRGEGPPLPPHADPAKVYRKEPYSEEMMRQNHILKQPALGHPGQRPDKEPNLAYEPQLPYIEKQASRDLEQPSYRYEVSSYTDQFSRNYDHRLRFEDRIPTYEDQWSYYDDKQPYQPRPFENQHPRDLDSRQHPEEASERGYFQRFEEPAPLSYDSRTRYEQLPRTSTLRHEEQPAPAYEVHNRYRPEAQPYSSTGPKSSEPKQYFDQYPRSYEQVPPPGFTSKTGHYEPLHGAAVVPPLIPSSQQKPEVLPSATKPQPPPPTLTEEEEDPAMKPQSVLTRVKMFENKRSASLENKKDVNDTASFKPPEVASKPPGASLAGPKPVPQSQFSEHDKTLYRLPEPQKPQVKPPEDIVRSNHYDPEEDEEYYRKQLSYFDRRSFESKPSAHLPAGHHSEPAKPVHSQSQPNFSSYSSKGKPETDAVDRSFSEKRYDPAQATPPPPPLPSQYSQPAPPLSSSSLHIHSKGAQGEGNSVSLDFQNSYMSKPDPPPSQSKPATFRPPTREDPPQTFYPQKSFPDKAPVNGAEQTQKTITPVYNRFTPKPYTSSARPFERKFESPKFNHNLLPSETVHKPELSSKTPTSPKTLMKAHSSTQPPEFDSGVETFSVHTDKPKYQMNNISTMPKAVPVSPSAVEEDEDEDGHTVVATARGIFNSNGGVLSSIETGVSIIIPQGAIPEGIEQEIYFKVCRDNSILPPLDKEKGETLLSPLVMCGPHGLKFLKPVELRLPHCDPKTWQNKCLPGDPNYLVGANCVSVLIDHF

SEQ ID NO: 142 - protein, 1190 aa, Mus musculus
MPVRGDRGFPPRRELSGWQRGPGMEEVIWEQYTVTLQKDSKRGFGIAVSGGRDNPHFENGETSIVISDVLPGGPADGLLQENDRVVMVNGTPMEDVLHSFAVQQLRKSGKIAAIVVKRPRKVQVAPLQGSPPLSHDDRGFEVIEEFDGRSFRSGYSERSRHSSHDMLSHSWEGNRERGRPHQRTQSRERERSRGRSLERGLDQEDYGRSRERSRGRSLERGLDRDFVSRDHSRGRSIDRDYDRDYERSYHEAYEPDYGGGYSPSYDRRAHPETRYERSRSREHLRSRSPSPESRSRHEHKGQHDPDRPIGVLLTKSKANEEYGLRLGSQIFIKEMTRTGLATKDGNLHEGDIILKINGTVTENMSLTDARKLIEKSRGKLQLVVLRDSKQTLINIPALNDSDSEVEDISEIESNRSFSPEERRQQYSDQDYHSSTEKLKERPSSREETSGRLSRMGATPTPFKSTGDITAAGVTEASREPRYQEEGPVPQPRTAPRVFLRPSPEDEAIYGPNTKMVRFKKGDSVGLRLAGGNDVGIFVAGIQEGTSAEQEGLQEGDQILKVNTQDFRGLVREDAVLYLLEIPKGETVTILAQSRADVYRDILACGRGDSFFIRSHFECEKETPQSLAFTRGEVFRVVDTLYDGKLGHWLAVRIGNELEKGLIPNKSRAEQMASVQNAQRENAGDRADFWRMRGQRSSGGVKKNLRKSREDLAAAVSVSTKFPAYEKVLLREAGFKRPVVLFGPIADIAMERLATELPDLFQTAKTEPKDAGSEKSSGVVRLNTVRQIIEQDKHALLDVTPKAVDLLNYTQWFPIVIFFNPDSRQGVKTIRQRLSPTSNKSSRKLFDQANKLKKTCSHLFTATINVNSANDGWFGSLKDSIQQQQNEAVWVSEGKMEGMDDDAEDRMSYLTAMGADYLSCDSRLISDFEDTDGEGGAYTDNELEEPAEEPLVSSITRSSEPVQHEENIRKSSPEPRAQMRRAASRDQLRDASPPPAFKPEPPKARSQNREDSFDYSKSNLPATAGSEIPGGSTKGYPPPIAAKPAFGRPILKPSTPVPMPESEEVGESTEEQEDAPRSVLGRVKIFEKMDHKAKLQRMQELQEAQNARIEIAQKHPDIYAVPIKAPKPDAGLPPHMSSRPPEPQKAPSRLYQDTRGSYGSDPEEEEYRQQLAAHSKRGYYSQPSRYRDTEL

SEQ ID NO: 143 - protein, 849 aa, Mus musculus
MHKHQHCCKCPECYEVTRLAALRRLEPPGYGDWQVPDPYGPSGGNGASSGYGGYSSQTLPSQAGATPTPRTKAKLIPTGRDVGPVPPKPVPGKSTPKLNGSGPGWWPECTCTNRDWYEQASPAPLLVNPEALEPSLSVNGSDGMFKYEEIVLERGNSGLGFSIAGGIDNPHVPDDPGIFITKIIPGGAAAMDGRLGVNDCVLRVNEVDVSEVVHSRAVEALKEAGPVVRLVVRRRQPPPETIMEVNLLKGPKGLGFSIAGGIGNQHIPGDNSIYITKIIEGGAAQKDGRLQIGDRLLAVNNTNLQDVRHEEAVASLKNTSDMVYLKVAKPGSIHLNDMYAPPDYASTFTALADNHISHNSSLGYLGAVESKVTYPAPPQVPPTRYSPIPRHMLAEEDFTREPRKIILHKGSTGLGFNIVGGEDGEGIFVSFILAGGPADLSGELRRGDRILSVNGVNLRNATHEQAAAALKRAGQSVTIVAQYRPEEYSRFESKIHDLREQMMNSSMSSGSGSLRTSEKRSLYVRALFDYDRTRDSCLPSQGLSFSYGDILHVINASDDEWWQARLVTPHGESEQIGVIPSKKRVEKKERARLKTVKFHARTGMIESNRDFPGLSDDYYGAKNLKGVTSNTSDSESSSKGQEDAILSYEPVTRQEIHYARPVIILGPMKDRVNDDLISEFPHKFGSCVPHTTRPRRDNEVDGQDYHFVVSREQMEKDIQDNKFIEAGQFNDNLYGTSIQSVRAVAERGKHCILDVSGNAIKRLQQAQLYPIAIFIKPKSIEALMEMNRRQTYEQANKIFDKAMKLEQEFGEYFTAIVQGDSLEEIYNKIKQIIEDQSGHYIWVPSPEKL

SEQ ID NO: 144 - protein, 2055 aa, Mus musculus
MLETIDKNRALQAAERLQSKLKERGDVANEDKLSLLKSVLQSPLFSQILNLQTSLQQLKDQVNIATLATAAADHAHTPQFSSAVISNLQSESLLLSPNHGNLEALPGPGAPAVMDGKPTCDELDQLIKNMAQGRHVEIFELLKPPCGGLGFSVVGLRSENRGELGIFVQEIQEGSVAHRDGRLKETDQILAINGQVLDQTITHQQAISILQKAKDTVQLVIARGSLPPVSSPRISRSPSAASTISAHSNPMHWQHVETIELVNDGSGLGFGIIGGKATGVIVKTILPGGVADQHGRLCSGDHILKIGDTDLAGMSSEQVAQVLRQCGNRVKLMIARGAVEETPASSSLGITLSSSTSSTSEMRVDASTQKNDESETFDVELTKNVQGLGITIAGYIGDKKLEPSGIFVKSITKSSAVEHDGRIQIGDQIIAVDGTNLQGFTNQQAVEVLRHTGQTVRLTLMRKGASQEAELTSRGDTAKDVDLPAENCEKDEESLSLKRNTSILPIEEEGFPLLSAELEEAEDVQQEAALLTKWQRIMGINYEIVVAHVSKFSENSGLGISLEATVGHHFIRSVLPEGPVGHSGKLFSGDELLEVNGINLLGENHQDVVNILKELPIDVTMVCCRRTVPPIALSEMDSLDINDLELTEKPHIDLGEFIGSSETEDPMLAMSDVDQNAEEIQTPLAMWEAGGQSIELEKGSRGLGFSILDYQDPIDPANTVIVIRSLVPGGIAEKDGRLFPGDRLMFVNDINLENSTLEEAVEALKGAPSGMVRIGVAKPLPLSPEEGYVSAKEDAFLCSPHACKESGLSDKALFRADLALIDTPDAESIAESRFESQFSPDNDSVYSTQASIFSLHDGTCSDGMNYGPSLPSSPPKDVTSSSEVVLGLHLSLEELYTQNLLQRQHAGSPPTDMRPAPTSGFPISDYTTTNAVEQKYECANPVAWPHSQLPSSLSTSELAPALPAVAQKYLTDQSSLASDAESVNLQSMSQEAFERTVTIAKGSSSLGMTVSANKDGLGVIVRSIIHGGAISRDGRIAVGDCILSINEESTISLTNAQARAMLRRHSLIGPDIKITYVPAEHLEEFRVSFGQQAGGIMALDIFSSYTGRDIPELPEREEGEGEESELQNAAYSSWSQPRRVELWREPSKSLGISIVGGRGMGSRLSNGEVMRGIFIKHVLEDSPAGKNGTLKPGDRIIEVDGMDLRDASHEQAVEAIRKAGNPVVFMVQSIINRPRKSPLPSLPHSLYPKYSFSSTNPFADSLQLTTDQAPSQSESETEKPALCNVPPSSPSVFSEMGSDCAQPSATAVSEDEDKEDEFGYSWKNIQERYGSLTGQLHVIELEKGQSGLGLSLAGNKDRTRMSVFIVGIDPTGAAGRDGRLQIADELLEINGQILYGRSHQNASSIIKCAPSKVKIIFIRNADAVNQMAVCPGIAADSPSSTSDSPQNKEVEPCSTTSASAADLSSLTDVYQLELPKDQGGLGIAICEEDTINGVMIESLTEHGGAAKDGRLKPGDHILAVDDEVVAGCPVEKFISLLKTAKATVKLTVRAENPACPAVPSSAVTVSGERKDNSQTPAVPAPDLEPIPSTSRSSTPAVFASDPATCPIIPGCETTIEISKGQTGLGLSIVGGSDTLLGAIIIHEVYEEGAACKDGRLWAGDQILEVNGIDLRKATHDEAINVLRQTPQRVRLTLYRDEAPYKEEDVCDTFTIELQKRPGKGLGLSIVGKRNDTGVFVSDIVKGGIADADGRLMQGDQILMVNGEDVRHATQEAVAALLKCSLGAVTLEVGRVKAAPFHSERRPSQSSQVSESSLSSFTPPLSGINTSESLESNSKKNALASEIQGLRTVEIKKGPADSLGLSIAGGVGSPLGDVPIFIAMMHPNGVAAQTQKLRVGDRIVTICGTSTDGMTHTQAVNLMKNASGSIEVQVVAGGDVSVVTGHQQELANPCLAFTGLTSSSIFPDDLGPPQSKTITLDRGPDGLGFSIVGGYGSPHGDLPIYVKTVFAKGAAAEDGRLKRGDQIIAVNGQSLEGVTHEEAVAILKRTKGTVTLMVLS

SEQ ID NO: 145 - protein, 355 aa, Mus musculus
MSADAAAGEPLPRLCCLEKGPNGYGFHLHGEKGKVGQFIRLVEPGSPAEKSGLLAGDRLVEVNGENVEKETHQQVVSRIRAALNAVRLLVVDPETDERLKKLGVSIREELLRPQEKSEQAEPPAAADTHEAGDQNEAEKSHLRELRPRLCTMKKGPNGYGFNLHSDKSKPGQFIRAVDPDSPAEASGLRAQDRIVEVNGVCMEGKQHGDVVSAIKGGGDEAKLLVVDKETDEFFKKCKVIPSQEHLDGPLPEPFSNGEIQKESSREALVEPASESPRPALARSASSDTSEELNSQDSPKRQVSTEPSSTSSSSSDPILDLNISLAVAKERAHQKRSSKRAPQMDWSKKNELFSNL

SEQ ID NO: 146 - protein, 337 aa, Mus musculus
MAALESLRPRLCRLVRGEQGYGFHLHGEKGRRGQFIRRVEPGSPAEAAALRAGDRLVEVNGVNVEGETHHQVVQRIKAVEGQTQLLVVDKETDEELCRRQLTCTEEMAHRGLPPAHNPWEPKPDWACSGSLGSDTGQKDVNGPPRELRPRLCHLRRGPQGYGFNLHSDKSRPGQYIRSVDPGSPASHSGLRAQDRLIEVNGQNVEGLRHAEVVARIKAQEDEARLLVVDPETDEHFKRLRVIPTEEHVEGPLPSPVTNGTSPAQLNGGSVCSSRSDLPGSEKDNEDGSTWKRDPFQESGLHLSPTAAEAKEKARATRVNKRAPQMDWNRKREIFSNF

SEQ ID NO: 147 - protein, 1322 aa, Mus musculus
MEPHGHSGKSRKSTKFRSISRSLILCNAKTSDDGSSPDEKYPDPFETSLCQGKEGFFHSSMQLADTFEAGLSNIPDLALASDSAQLAAAGSDRGKHCRKMFFMKESSSTSSKEKSGKPEAQSSSFLFPKACHQRTRSNSTSVNPYSAGEIDFPMTKKSAAPTDRQPYSLCSNRKSLSQQLDYPILGTARPTRSLSTAQLGQLSGGLQASVISNIVLMKGQAKGLGFSIVGGKDSIYGPIGIYVKSIFAGGAAAADGRLQEGDEILELNGESMAGLTHQDALQKFKQAKKGLLTLTVRTRLTTPPSLCSHLSPPLCRSLSSSTCGAQDSSPFSLESPASPASTAKPNYRIMVEVSLKKEAGVGLGIGLCSIPYFQCISGIFVHTLSPGSVAHLDGRLRCGDEIVEINDSPVHCLTLNEVYTILSHCDPGPVPIIVSRHPDPQVSEQQLKEAVAQAVEGVKFGKDRHQWSLEGVKRLESSWHGRPTLEKEREKHSAPPHRRAQKIMVRSSSDSSYMSGSPGGSPCSAGAEPQPSEREGSTHSPSLSPGEEQEPCPGVPSRPQQESPPLPESLERESHPPLRLKKSFEILVRKPTSSKPKPPPRKYFKNDSEPQKKLEEKEKVTDPSGHTLPTCSQETRELLPLLLQEDTAGRAPCTAACCPGPAASTQTSSSTEGESRRSASPETPASPGKHPLLKRQARMDYSFDITAEDPWVRISDCIKNLFSPIMSENHSHTPLQPNTSLGEEDGTQGCPEGGLSKMDAANGAPRVYKSADGSTVKKGPPVAPKPAWFRQSLKGLRNRAPDPRRPPEVASAIQPTPVSRDPPGPQPQASSSIRQRISSFENFGSSQLPDRGVQRLSLQPSSGETTKFPGKQDGGRFSGLLGQGATVTAKHRQTEVESMSTTFPNSSEVRDPGLPESPPPGQRPSTKALSPDPLLRLLTTQSEDTQGPGLKMPSQRARSFPLTRTQSCETKLLDEKASKLYSISSQLSSAVMKSLLCLPSSVSCGQITCIPKERVSPKSPCNNSSAAEGFGEAMASDTGFSLNLSELREYSEGLTEPGETEDRNHCSSQAGQSVISLLSAEELEKLIEEVRVLDEATLKQLDSIHVTILHKEEGAGLGFSLAGGADLENKVITVHRVFPNGLASQEGTIQKGNEVLSINGKSLKGATHNDALAILRQARDPRQAVIVTRRTTVEATHDLNSSTDSAASASAASDISVESKEATVCTVTLEKTSAGLGFSLEGGKGSLHGDKPLTINRIFKGTEQGEMVQPGDEILQLAGTAVQGLTRFEAWNVIKALPDGPVTIVIRRTSLQCKQTTASADS

SEQ ID NO: 148 - protein, 966 aa, Mus musculus
MNRFNGLCKVCSERRYRQITIRRGKDGFGFTICCDSPVRVQAVDSGGPAERAGLQQLDTVLQLNERPVEHWKCVELAHEIRSCPSEIILLVWRVVPQIKPGPDGGVLRRASCKSTHDLLSPPNKREKNCTHGAPVRPEQRHSCHLVCDSSDGLLLGGWERYTEVGKRSGQHTLPALSRTTTPTDPNYIILAPLNPGSQLLRPVYQEDTIPEEPGTTTKGKSYTGLGKKSRLMKTVQTMKGHSNYQDCSALRPHIPHSSYGTYVTLAPKVLVFPVFVQPLDLCNPARTLLLSEELLLYEGRNKTSQVTLFAYSDLLLFTKEEEPGRCDVLRNPLYLQSVKLQEGSSEDLKFCVLYLAEKAECLFTLEAHSQEQKKRVCWCLSENIAKQQQLAAPPTERKMFETEADEKEMPLVEGKGPGAEEPAPSKNPSPGQELPPGQDLPPSKDPSPSQELPAGQDLPPSKDPSPSQELPAGQDLPPSKDPSPSQELPVGQDLPPRKDSSGQEAAPGPESPSSEDIATCPKPPQSPETSTSKDSPPGQGSSPTTELPSCQGLPAGQESTSQDPLLSQEPPVIPESSASVQKRLPSQESPSSLGSLPEKDLAEQTISSGEPPVATGAVLPASRPNFVIPEVRLDNAYSQLDGAHGGSSGEDEDAEEGEEGGEGEEDEEDDTSDDNYGDRSEAKRSSLIETGQGAEGGFSLRVQNSLRRRTHSEGSLLQESRGPCFASDTTLHCSDGEGATSTWAIPSPRTLKKELGRNGGSMHHLSLFFTGHRKMSGTDLTECDEASRKRKSKNIAKDMKNKLAIFRRRNESPGAQPASKTDKTTKSFKPTSEEALKWSESLEKLLLHKYGLEVFQAFLRTEFSEENLEFWLACEDFKKVKSQSKMAAKAKKIFAEFIAIQACKEVNLDSYTREHTKENLQSITRGCFDLAQKRIFGLMEKDSYPRFLRSDLYLDLINQKKMSPPL

SEQ ID NO: 149 - protein, 519 aa, Mus musculus
MASTFNPRECKLSKQEGQNYGFFLRIEKDTDGHLIRVIEEGSPAEKAGLLDGDRVLRINGVFVDKEEHAQVVELVRKSGNSVTLLVLDGDSYEKAVKNQVDLKELDQSQREAALNDKKPGPGMNGAVEPCAQPRLCYLVKEGNSFGFSLKTIQGKKGVYLTNIMPQGVAMKAGVLADDHLIEVNGENVENASHEEVVEKVTKSGSRIMFLLVDKETARCHSEQKTQFKRETASLKLLPHQPRVVVIKKGSNGYGFYLRAGPEQKGQIIKDIEPGSPAEAAGLKNNDLVVAVNGKSVEALDHDGVVEMIRKGGDQTTLLVLDKEAESIYSLARFSPLLYCQSQELPNGSVKEGPAPIPAPLEATGSEPTEDAEGHKPKLCRLLKEDDSYGFHLNAIRGQPGSFVKEVQQGGPADKAGLENEDVIIEVNGENVQEEPYDRVVERIKSSGKHVTLLVCGKMAYSYFQAKKIPIVSSMAEPLVAGPDEKGETSAESEHDAHPAKDRTLSTASHSSSNSEDTEM

SEQ ID NO: 150 - protein, 416 aa, Mus musculus
MFADLDYDIEEDKLGIPTVPGKVTLQKDAQNLIGISIGGGAQYCPCLYIVQVFDNTPAALDGTVAAGDEITGVNGKSIKGKTKVEVAKMIQEVKGEVTIHYNKLQADPKQGMSLDIVLKKVKHRLVENMSSGTADALGLSRAILCNDGLVKRLEELERTAELYKGMTEHTKNLLRAFYELSQTHRAFGDVFSVIGVREPQPAASEAFVKFADAHRSIEKFGIRLLKTIKPMLTDLNTYLNKAIPDTRLTIKKYLDVKFEYLSYCLKVKEMDDEEYSCIALGEPLYRVSTGNYEYRLILRCRQEARARFSQMRKDVLEKMELLDQKHVQDIVFQLQRFVSTMSKYYNDCYAVLQDADVFPIEVDLAHTTLAYGPNQGSFTDGEEEDEEEEDGAAREVSKDACGATGPTDKGGSWCDS

SEQ ID NO: 151 - protein, 852 aa, Mus musculus
MFFACYCALRTNVKKYRYQDEDGPHDHSLPRLTHEVRGPELVHVSEKNLSQIENVHGYVLQSHISPLKASPAPIIVNTDTLDTIPYVNGTEIEYEFEEITLERGNSGLGFSIAGGTDNPHIGDDPGIFITKIIPGGAAAEDGRLRVNDCILRVNEVDVSEVSHSKAVEALKEAGSIVRLYVRRRRPILETVVEIKLFKGPKGLGFSIAGGVGNQHIPGDNSIYVTKIIDGGAAQKDGRLQVGDRLLMVNNYSLEEVTHEEAVAILKNTSDVVYLKVGKPTTIYMTDPYGPPDITHSYSPPMENHLLSGNNGTLEYKTSLPPISPGRYSPIPKHMLGEDDYTRPPEPVYSTVNKLCDKPASPRHYSPVECDKSFLLSTPYPHYHLGLLPDSDMTSHSQHSTATRQPSVTLQRAISLEGEPRKVVLHKGSTGLGFNIVGGEDGEGIFVSFILAGGPADLSGELQRGDQILSVNGIDLRGASHEQAAAALKGAGQTVTIIAQYQPEDYARFEAKIHDLREQMMNHSMSSGSGSLRTNQKRSLYVRAMFDYDKSKDSGLPSQGLSFKYGDILHVINASDDEWWQARRVTLDGDSEEMGVIPSKRRVERKERARLKTVKFNAKPGVIDSKGDIPGLGDDGYGTKTLRGQEDLILSYEPVTRQEINYTRPVIILGPMKDRINDDLISEFPDKFGSCVPHTTRPKRDYEVDGRDYHFVISREQMEKDIQEHKFIEAGQYNDNLYGTSVQSVRFVAERGKHCILDVSGNAIKRLQVAQLYPIAIFIKPKSLEPLMEMNKRLTEEQAKKTYDRAIKLEQEFGEYFTAIVQGDTLEDIYNQCKLVIEEQSGPFIWIPSKEKL

SEQ ID NO: 152 - protein, 721 aa, Mus musculus
MDCLCIVTTKKYRYQDEDTPPLEHSPAHLPNQANSPPVIVNTDTLEAPGYVNGTEGEMEYEEITLERGNSGLGFSIAGGTDNPHIGDDPSIFITKIIPGGAAAQDGRLRVNDSILFVNEVDVREVTHSAAVEALKEAGSIVRLYVMRRKPPAEKIIEIKLIKGPKGLGFSIAGGVGNQHIPGDNSIYVTKIIEGGAAHKDGRLQIGDKILAVNSVGLEDVMHEDAVAALKNTYDVVYLKVAKPSNAYLSDSYAPPDITTSYSQHLDNEISHSSYLGTDYPTAMTPTSPRRYSPVAKDLLGEEDIPREPRRIVIHRGSTGLGFNIVGGEDGEGIFISFILAGGPADLSGELRKGDQILSVNGVDLRNASHEQAAIALKNAGQTVTIIAQYKPEEYSRFEAKIHDLREQLMNSSLGSGTASLRSNPKRGFYIRALFDYDKTKDCGFLSQALSFHFGDVLHVIDASDEEWWQARRVHSDSETDDIGFIPSKRRVERREWSRLKAKDWGSSSGSQGREDSVLSYETVTQMEVHYARPIIILGPTKDRANDDLLSEFPDKFGSCVPHTTRPKREYEIDGRDYHFVSSREKMEKDIQAHKFIEAGQYNSHLYGTSVQSVREVAEQGKHCILDVSANAVRRLQAAHLHPIAIFIRPRSLENVLEINKRITEEQARKAFDRATKLEQEFTECFSAIVEGDSFEEIYHKVKRVIEDLSGPYIWVPARERL

SEQ ID NO: 153 - protein, 904 aa, Mus musculus
MEELTIWEQHTATLYKDPRRGFGIAVSGGHDRASGSVVVSDVVPGGPAEGRLRTGDHIVMVNGVSVENVTSAFAIQILKTCTKTANVTVKRPRRVQLPATKASPASGHQLSDQEEADHGRGYEGDSSSGSGRSWGERSRRSRAGRRGRVGSHGRRSSGGGSEANGLDLVSGYKRLPKQDVLMRPLKSVLVKRRNSEEFGVKLGSQIFIKHITESGLAARNHGLQEGDLILQINGVSSANLSLSDTRRLIEKSEGELTLLVLRDSGQFLVNIPPAVSDSDSSLMEDISDLTSELSQAPPSHVPPPPLKGQRSPEDSQTDSPVETPQPRRRERSVNSRAIAEPESPGESRYDIYRVPSRQSLEDRGYSPDTRVVSFPKGASIGLRLAGGNDVGIFVSGVQAGSPADGQGIQEGDEILQVNGMPFRNLTREEAVQFLLGLPPGEDMELVTQSKQDIFKKMVQSRVGDSFYIRTHFELEPSPPYGLGFTRGDVFHVVDTLYPGSGPGHGHSSHGGLWLAARMGRDLREQERGVIPNQSRAEQLASLEAAQRAAGVGPGASVGSNPRAEFWRLRGLRRGTKKASTQRSREDLSALTRQGHYPPYERVVLREASFKRPVVILGPVADIAMKKLTTEMPEEFEIAESMSRTDSPSKIIKLDTVRVIAERDKHALLDVTPSAIERLNYVQYYPIVIFCAPESRPALKALREWLAPASRRSSRRLYAQAQKLQKHSGHLFTATIPLHGTSDSWYQEVKAVIQQQQARPIWTAEDQLNSSSEDLDLPGHGLAASSGDLSCDSRTNSDYEDTDGEGAYTDREGGPQDVDEEVAPTALARSSEPVWVDDHQGLMGHGTTITDKWETQADSHYTQDQRRQDSMRTYKHEALRKKFTRARDVESSDDEGYDWGPATDL

SEQ ID NO: 154 - protein, 728 aa, Mus musculus
MNQPDLADDPDPSPEPLCIVCGQNHSPEENHFYTYTEDVDDDLICHICLQALLDPLDTPCGHTYCTLCLTNFLVEKDFCPVDRKPVVLQHCKKSSILVNKLLNKLLVTCPFTEHCTEVLQRCDLQHHFQTSCKGASHYGLTKDRKRRSQDGCPDGCASLMATTLSPEVSAAATISLMTDEPGLDNPAYVSSVEDGEPVANSSDSGRSNRTRARPFERSTMRSRSFKKINRALSALRRTKSGSVVANHVDQGRDNSENTTVPEVFPRLFHLIPDGEITSIKINRADPSESLSIRLVGGSETPLVHIIIQHIYRDGVIARDGRLLPGDIILKVNGMDISNVPHNYAVRLLRQPCQVLRLTVLREQKFRSRSNAHVPDSYGPRDDSFHVILNKSSPEEQLGIKLVRRVDEPGVFIFNVLNGGVADRHGQLEENDRVLAINGHDLRFGSPESAAHLIQASERRVHLVVSRQVRQSSPDIFQEAGWISNGQQSPGPGERNTASKPAATCHEKVVSVWKDPSESLGMTVGGGASHREWDLPIYVISVEPGGVISRDGRIKTGDILLNVNGIELTEVSRTEAVAILKSAPSSVVLKALEVKEQEAQEDCSPAALDSNHNVTPPGDWSPSWVMWLELPQYLCNCKDVILRRNTAGSLGFCIVGGYEEYSGNKPFFIKSIVEGTPAYNDGRIRCGDILLAVNGRSTSGMIHACLARMLKELKGRITLTIASWPGTFL

SEQ ID NO: 155 - protein, 1429 aa, Mus musculus
MEEHTFGVQQIQPNVISVRLFKRKVGGLGFLVKERVSKPPVIISDLIRGGAAEQSGLIQAGDIILAVNDRPLVDLSYDSALEVLRGIASETHVVLILRGPEGFTTHLETTFTGDGTPKTIRVTQPLGTPTKAVDLSRQPSASKDQPLAVDRVPGPSNGPQHAQGRGQGAGSVSQANGVAIDPTMKNTKANLQDSGEQDELLKEIEPVLSILTGGGKAVNRGGPAKAEMKDTGIQVDRDLDGKLHKAPPLGGENDRVFNDLWGKGNVPVVLNNPYSENEQSPASGKQSPTKNGSPSRCPRFLKVKNWETDVVLTDTLHLKSTLETGCTEQICMGSIMLPSHHIRKSEDVRTKDQLFPLAKEFLDQYYSSIKRFGSKAHMDRLEEVNKEIESTSTYQLKDTELIYGAKHAWRNASRCVGRIQWSKLQVFDARDCTTAHGMFNYICNHVKYATNKGNLRSAITIFPQRTDGKHDFRVWNSQLIRYAGYKQPDGSTLGDPANVEFTEICIQQGWKPPRGRFDVLPLLLQANGNDPELFQIPPELVLEVPIRHPKFDWFKDLGLKWYGLPAVSNMLLEIGGLEFSACPFSGWYMGTEIGVRDYCDNSRYNILEEVAKKMDLDMRKTSSLWKDQALVEINIAVLYSFQSDKVTIVDHHSATESFIKHMENEYRCRGGCPADWVWIVPPMSGSITPVFHQEMLNYRLTPSFEYQPDPWNTHVWKGTNGTPTKRRAIGFKKLAEAVKFSAKLMGQAMAKRVKATILYATETGKSQAYAKTLCEIFKHAFDAKAMSMEEYDIVHLEHEALVLVVTSTFGNGDPPENGEKFGCALMEMRHPNSVQEERKSYKVRFNSVSSYSDSRKSSGDGPDLRDNFESTGPLANVRFSVFGLGSRAYPHFCAFGHAVDTLLEELGGERILKMREGDELCGQEEAFRTWAKKVFKAACDVFCVGDDVNIEKANNSLISNDRSWKRNKFRLTYVAEAPELTQGLSNVHKKRVSAARLLSRQNLQSPKSSRSTIFVRLHTNGNQELQYQPGDHLGVFPGNHEDLVNALIERLEDAPPANHVVKVEMLEERNTALGVISNWKDESRLPPCTIFQAFKYYLDITTPPTPLQLQQFASLATNEKEKQRLLVLSKGLQEYEEWKWGKNPTMVEVLEEFPSIQMPATLLLTQLSLLQPRYYSISSSPDMYPDEVHLTVAIVSYHTRDGEGPVHHGVCSSWLNRIQADDVVPCFVRGAPSFHLPRNPQVPCILVGPGTGIAPFRSFWQQRQFDIQHKGMNPCPMVLVFGCRQSKIDHIYREETLQAKNKGVFRELYTAYSREPDRPKKYVQDVLQEQLAESVYRALKEQGGHIYVCGDVTMAADVLKAIQRIMTQQGKLSEEDAGVFISRLRDDNRYHEDIFGVTLRTYEVTNRLRSESIAFIEESKKDTDEVFSS

SEQ ID NO: 156 - protein, 661 aa, Mus musculus
MILEERPDGQGTGEESSRPQDDGSIRKGYGSFVQNQPGQLQSHRARLHQQISKELRMRTGAENLYRATSNTWVRETVALELSYVNSNLQLLKEELAELSTSVDVDQPEGEGITIPMIPLGLKETKELDWATPLKELISEHFGEDGTSFETEIQELEDLRQATRTPSRDEAGLDLLAAYYSQLCFLDARFFSPSRSPGLLFHWYDSLTGVPAQQRALAFEKGSVLFNIGALHTQIGARQDCSCTEGTNHAAEAFQRAAGAFRLLRENFSHAPSPDMSAASLSMLEQLMIAQAQECIFKGLLLPASATPDICPDQLQLAQEAAQVATEYGLVHRAMAQPPVRDYLPASWTNLAHVKAEHFCALAHYHAAMALCESHPAKGELARQEHVFQPSTPHEPLGPTLPQHPEDRRKLAKAHLKRAILGQEEALRLHTLCRVLRKVDLLQVVVTQALRRSLAKYSQLEREDDFFEATEAPDIQPKTHQTPEVRMPSLSQVKVTDFFHRLGPLSVFSTKNRWQLVGPVHMTRGEGSFGFTLRGDSPVLIAAVVPGGQAESAGLKEGDYIVSVNGQPCKWWKHLEVVTQLRSMGEEGVSLQVVSLLPSPEPRGTGPRRAALLWNQRECGFETPMPTRTRPWPILGWSRKNKQGKTGSHPDPCTNRNCVTCP

SEQ ID NO: 157 - protein, 316 aa, Oryctolagus cuniculus
MAAPEPLRPRLCRLVRGEQGYGFHLHGEKGRRGQFIRRVEPGSPAEAAALRAGDRLVEVNGVNVEGETHHQVVQRIKAVEGETRLLVVDKETDEELRRRQLTCTEDMAQRGLPPAHDPWEPKPDWARAGSLSSDAGQKDVNGPPRELRPRLCHLRKGPQGYGFNLHSDKSRPGQYIRSVDPGSPAAHSGLCAQDRLIEVNGQNVEGLRHAEVVARIKAKEDEARLLLVDPETDEYFKRLRVTPTEEHVEGPLPSPITNGTSPAQDASAWKRDPFQESGLHLSPTAAEAKEKARATRVNKRAPQMDWNRKREIFSNF

SEQ ID NO: 158 - protein, 1043 aa, Rattus norvegicus
MLAVSLKWRLGVVRRRPKDDGPYSKGGKDTAGTDGALVCRRQSIPEEFRGITMVELIKREGSTLGLTISGGTDKDGKPRVSNLRPGGLAARSDLLNVGDYIRSVNGIRLTRLRHDEIITLLKNVGERVVLEVEYELPPPAPENNPRIISKTVDVSLYKEGNSFGFVLRGGAHEDLHKSRPLVLTYVRPGGPADREGSLKVGDRLLSIDGIPLHGASHATAIATLQQCSHEALFQVEYDVATPDTVANASGPLVVEIAKTPGSALGISLTTGSHRNKPAITIDRIKPASVVDRSGALHAGDHILAIDGTSTEHCSLVEATKLLASVTEKVRLEILPAPQSRRPLKPPEAVRIQRSEQLHHWDPCVPSCHSPRPSHCRAPTWAPGGQDQSRSVSSTPFSSPTMNPAFPCANASTLPRGPMSPRTTAGRRRQRRKEHRSSLSLASSTVGPGGQIVHTETTEVVLCGDPLSGFGLQLQGGIFATETLSSPPLVRFIEPDSPAERCGLLQVGDRVLAINGIATEDGTMEEANQLLRDAALARKVVLEIEFDVAESVIPSSGTFHVKLPKRRGVELGITISSASRKRGEPLIISDIKKGSVAHRTGTLEPGDKLLAIDNIRLDHCPMEYAVQILRQCEDLVKLKIRKDEDNSDEQESSGAVSYTVELKRYGGPLGITISGTEEPFDPIIISGLTKRGLAERTGAIHVGDRILAINSVSLKGRPLSEAIHLLQVAGETVTLKIKKQLDRPLLPRQSGSLSEASDVDEDPPEALKGGLLTTHFSPAVPSVDSAVESWGSSATEGGFGGSGSYTPQVAVRSVTPQEWRSSRLKSSPPPLEPRRTSYTPGPTDESFPEEEEGDWEPPMSPAPGPAREEGFWRVLGEALEDLESCGQSELLRELEASIMTGTVQSVAVDGRPGSRPWRRSREVGTSPEDLQELLLPTPLEMHRVTLHKDPVRNDFGFSVSDGLLEKGVYVHTVRIDGPAQHGGLQPFDRLLQVNHVRTRDFDCCLAVPLLAEAGDILELVVSRNPLAQSRRTPGAPGPSSPQMI

SEQ ID NO: 159 - protein, 1277 aa, Rattus norvegicus
MSKSLKKKSHWTSKVHESVIGRNPEGQLGFELKGGAENGQFPYLGEVKPGKVAYESGSKLVSEELLLEVNETPVAGLTIRDVLAVIKHCKDPLRLKCVKQGGIVDKDLRHYLNLRFQKGSVDHELQQIIRDNLYLRTVPCTTRPHKEGEVPGVDYIFITVEDFMELEKSGALLESGTYEDNYYGTPKPPAEPAPLLLNVTDQILPGATPSAEGKRKRNKSVTNMEKASIEPPEEEEEERPVVNGNGVVITPESSEHEDKSAGASGETPSQPYPAPVYSQPEELKDQMDDTKSTKPEENEDSDPLPDNWEMAYTEKGEVYFIDHNTKTTSWLDPRLAKKAKPAEECKENELPYGWEKIDDPIYGTYYVDHINRRTQFENPVLEAKRKLQQHNMPHTELGTKPLQAPGFREKPLFTRDASQLKGTFLSTTLKKSNMGFGFTIIGGDEPDEFLQVKSVIPDGPAAQDGKMETGDVIVYINEVCVLGHTHADVVKLFQSVPIGQSVNLVLCRGYPLPFDPEDPANSMVPPLAIMERPPPVMVNGRHNYETYLEYISRTSQSVPDITDRPPHSLHSMPADGQLDGTYPPPVHDDNVSVASSGATQAELMTLTIVKGAKGFGFTIADSPTGQRVKQILDIQGCPGLCEGDLIVEINQQNVQNLSHTEVVDILKDCPVGSETSLIIHRGGFFSPWKTPKPMVDRWENQGSPQTSLSAPAVPQSLPFPPALHRSSFPDSTEAFDPRKPDPYELYEKSRAIYESRQQVPPRTSFRMDSSGPDYKELDVHLRRMESGFGFRILGGDEPGQPILIGAVIAMGSADRDGRLHPGDELVYVDGIPVAGKTHRYVIDLMHHAARNGQVNLTVRRKVLCGGEPCPENGRSPGSVSTHHSSPRSDYATYANSNHAAPSNNASPPEGFASHSLQTSDVIIHRKENEGFGFVIISSLNRPESGATITVPHKIGRIIDGSPADRCAKLKVGDRILAVNGQSIINMPHADIVKLIKDAGLSVTLRIIPQEELNNPTSAPSSEKQSPMAQQHSPLAQQHSPLAQPSPATPNSPVAQPAPPQPLQLQGHENSYRSEVKARQDVKPDIRQPPFTDYRQPPLDYRQPPGGDYSQPSPLDYRQHSPDTRQYPLSDYRQPQDFDYFTVDMEKGAKGFGFSIRGGREYKMDLYVLRLAEDGPAIRNGRMRVGDQIIEINGESTRDMTHARAIELIKSGGRRVRLLLKRGTGQVPEYGMVPSSLSMCMKSDKHGSPYFYLLGHPKDTTNPTPGALPLPPPQACRK

SEQ ID NO: 160 - protein, 909 aa, Rattus norvegicus
MADDDVLFEDVYELCEVIGKGPFSVVRRCINRETGQQFAVKIVDVAKFTSSPGLSTEDLKREASICHMLKHPHIVELLETYSSDGMLYMVFEFMDGADLCFEIVKRADAGFVYSEAVASHYMRQILEALRYCHDNNIIHRDVKPHCVLLASKENSAPVKLGGFGVAIQLGESGLVAGGRVGTPHFMAPEVVKREPYGKPVDVWGCGVILFILLSGCLPFYGTKERLFEGIIKGKYKMNPRQWSHISESAKDLVRRMLMLDPAERITVYEALNHPWLKERDRYAYKIHLPETVEQLRKFNARRKLKGAVLAAVSSHKFNSFYGDPPEELPDFSEDPTSSGLLAAERAVSQVLDSLEEIHALTDCSEKDLDFLHSVFQDQHLHTLLDLYDKINTKSSPQIRNPPSDAVQRAKEVLEEISCYPENNDAKELKRILTQPHFMALLQTHHVVAHEVYSDEALRVTPPPTSPYLNGDSPESANGDMDMENVTRVRLVQFQKNTDEPMGITLKMNELNHCIVARIMHGGMIHRQGTLHVGDEIREINGISVANQTVEQLQKMLREMRGSITFKIVPSYRTQSSSCERDSPSTSRQSPANGHSSTNNSVSIYVRAQFEYDPAKDDLIPCKEAGIRFRVGDIIQIISKDDHNWWQGKLENSKNGTAGLIPSPELQEWRVACIAMEKTKQEQQASCTWFGKKKKQYKDKYLAKHNADLVTYEEVVKLPAFKRKTLVLLGAHGVGRRHIKNTLITKHPERFAYPIPHTTRPPKKDEENGKNYYFVSHDQMMQDISNNEYLEYGSHEDAMYGTKLETIRKIHEQGLIAILDVEPQALKVLRTAEFPPFVVFIAAPTITPGLNEDESLQRLQKESDVLQRTYAHYFDLTIINNEIDETIRHLEEAVELVCTAPQWVPVSWVY

SEQ ID NO: 161 - protein, 1495 aa, Rattus norvegicus
MQCLEMTTKRKLIGRLVPCRCFRGEEEIISVLDYSHCSLQQVPKEVFNFERTLEELYLDANQIEELPKQLFNCQALRKLSIPDNDLSSLPTSIASLVNLKELDISKNGVQEFPENIKCCKCLTIIEASVNPISKLPDGFTQLLNLTQLYLNDAFLEFLPANFGRLVKLRILELRENHLKTLPKSMHKLAQLERLDLGNNEFSELPEVLDQIQNLRELWMDNNALQVLPGSIGKLKMLVYLDMSKNRIETVDMDISGCEALEDLLLSSNMLQQLPDSIGLLKKLTTLKVDDNQLTMLPNTIGNLSLLEEFDCSCNELESLPPTIGYLHSLRTLAVDENFLPELPREIGSCKNVTVMSLRSNKLEFLPEEIGQMQRLRVLNLSDNRLKNLPFSFTKLKELAALWLSDNQSKALIPLQTEAHPETKQRVLTNYMFPQQPRGDEDFQSDSDSFNPTLWEEQRQQRMTVAFEFEDKKEDDESAGKVKALSCQAPWDRGQRGITLQPARLSGDCCTPWARCDQQIQDMPVPQSDPQLAWGCISGLQQERSMCAPLPVAAQSTTLPSLSGRQVEINLKRYPTPYPEDLKNMVKSVQNLVGKPSHGVRVENANPTANTEQTVKEKFEHKWPVAPKEITVEDSFVHPANEMRIGELHPSLAETPLYPPKLVLLGKDKKESTDESEVDKTHCLNNSVSSGTYSDYSPSQASSASSNTRVKVGSLQPTTKDAVHNSLWGNRIAPPFPQPLDAKPLLTQREAVPPGNLPQRPDRLPMSDAFPDNWTDGSHYDNTGFVSEEATGENANNNPLLSSKARSVPAHGRRPLIRQERIVGVPLELEQSTHRHTPETEVPPSNPWQNWTRTPSPFEDRTAFPSKLETTPTTSPLPERKDHMKEPTETPGPFSPGVPWEYHDPTPNRSLGNVFSQIHCRPDSSKGVIAISKSTERLSPLMKDIKSNKFKKSQSIDEIDVGTYKVYNIPLENYASGSDHLGSHERPDKFLGPEHGMSSMSRSQSVPMLDDEMLMYGSSKGPPQQKASMTKKVYQFDQSFNPQGAVEVKAEKRIPPPFAHNSEYVQQPGKNIAKDLVSPRAYRGYPPMEQMFSFSQPSVNEDAMVNAQFASQGPRAGFLRRADSLASSTEMAMFRRVSEPHELPPGDRYGRAAYRGGLEGQSSVSMTDPQFLKRNGRYEDEHPSYQEVKAQAGSFPAKNLTQRRPLSARSYSTESYGASQTRPVSARPTMAALLEKIPSDYNLGNYGDKTSDNSDIKTRPTPVKGEESCGKMPADWRQQLLRHIEARRLDRTPSQQSNILDNGQEDVSPSGQWNPYPLGRRDVPPDTITKKAGSHIQTLMGSQSLQHRSREQQPYEGNINKVTIQQFQSPLPIQIPSSQATRGPQPGRCLIQTKGQRSMDGYPEQFCVRIEKNPGLGFSISGGISGQGNPFKPSDKGIFVTRVQPDGPASNLLQPGDKILQANGHSFVHMEHEKAVLLLKSFQNTVDLVIQRELTV

SEQ ID NO: 162 - protein, 333 aa, Rattus norvegicus
MPLGLGRRKKAPPLVENEEAEPSRSGLGVGEPGPLGGSGAGESQMGLPPPPASLRPRLVFHTQLAHGSPTGRIEGFTNVKELYGKIAEAFRLPAAEVMFCTLNTHKVDMDKLLGGQIGLEDFIFAHVKGQRKEVEVFKSEDALGLTITDNGAGYAFIKRIKEGSVIDHIQLISVGDMIEAINGQSLLGCRHYEVARLLKELPRGRTFTLKLTEPRKAFDMISQRSSGGHPGSGPQLGTGRGTLRLRSRGPATVEDLPSAFEEKAIEKVDDLLESYMGIRDTELAATMVELGKDKRNPDELAEALDERLGDFAFPDEFVFDVWGAIGDAKVGRY

SEQ ID NO: 163 - protein, 1112 aa, Rattus norvegicus
MIAVSFKCRCQILRRLTKDESPYTKSASQTKPPDGALAVRRQSIPEEFKGSTVVELMKKEGTTLGLTVSGGIDKDGKPRVSNLRQGGIAARSDQLDVGDYIKAVNGINLAKFRHDEIISLLKNVGERVVLEVEYELPPVSIQGSSVMFRTVEVTLHKEGNTFGFVIRGGAHDDRNKSRPVVITCVRPGGPADREGTIKPGDRLLSVDGIRLLGTTHAEAMSILKQCGQEATLLIEYDVSVMDSVATASGPLLVEVAKTPGASLGVALTTSVCCNKQVIVIDKIKSASIADRCGALHVGDHILSIDGTSMEYCTLAEATQFLANTTDQVKLEILPHHQTRLALKGPDHVKIQRSDRQLPWDPWASSQCSVHTNHHHNPHHPDHCRVPALGFPKALTPNSPPAMVSSSSPTSMSAYSLSSLNMGTLPRSLYSTSPRGTMMRRRLKKKDFKSSLSLASSTVGLAGQVVHTETTEVVLTADPVTGFGIQLQGSVFATETLSSPPLISYIEADSPAERCGVLQIGDRVMAINGIPTEDSTFEEANQLLRDSSITSKVTLEIEFDVAESVIPSSGTFHVKLPKKHSVELGITISSPSSRKPGDPLVISDIKKGSVAHRTGTLELGDKLLAIDNIRLDSCSMEDAVQILQQCEDLVKLKIRKDEDNSDEQESSGAIIYTVELKRYGGPLGITISGTEEPFDPIIISSLTKGGLAERTGAIHIGDRILAINSSSLKGKPLSEAIHLLQMAGETVTLKIKKQTDAQPASSPKKLPIPSHSSDLGDGEEDPSPIQRPGKLSDVYPSTVPSVDSAVDSWDGSGIDARYGSQGTTFQTSGYNFNTYDWRSPKKRASLSPVPKPRSQTYPDVGLSNEDWDRSTASGFAGASDSADAEQEENFWSQALEDLETCGQSGILRELEATIMSGSTMSLNHEAPTARSQLGRQASFQERSNSRPHYSQTTRSNTLPSDVGRKSVTLRKMKQEIKEIMSPTPVELHKVTLYKDSGMEDFGFSVADGLLEKGVYVKNIRPAGPGDLGGLKPYDRLLQVNHVRTRDFDCCLVVPLIAESGNKLDLVISRNPLASQKSIEQPALPSDWSEQNSAFFQQPSHGGNLETREPTNTL

SEQ ID NO: 164 - protein, 1387 aa, Rattus norvegicus
MYRAGEPGKRQSGPAPPRVRSVEVARGRAGYGFTLSGQAPCVLSCVMRGSPADFVGLRAGDQILAINEINVKKASHEDVVKLIGKCSGVLRMVISEGSSHVEPSSSDEEGGLCEGKGWLRPKLDSKALGINRAERVVEEVQSGGIFNMIFESPSLCASGSEPLKLKQRSLSESAALRLDVGQDSLCTPHPSMLSKEEISKVINDDSVFTVGLDNHDDFGLDASILNVAMVVGYLGSIELPSTSSNLEHDSLQAIRGCMRRLRAEQKIHSLVTMKVMHDCVQLVTDRAGVVAEYPAEKLAFSAVCPDDRRFFGLVTMQTNDDGCLAQEDEGALRTSCHVFMVDPDLFHHKIHQGIARRFGFACTADPDTSGCLEFPASSLPVLQFISVLYRDMGELIEGVRARAFLDGDADAHQNNSTSSNSDSGIGNFNQEEKSNRVLVVDLGGGSSRHGQGSSPGWESVSGRGSQPWSAPWNGTFCHDSEAGSPLETSPNTDRFWDLTKHSGPVFHMEVPPATLRSSIPPSKRGATGSSCGFNQRWLPVHVLQEWQCGHASDQESYTDSTDGWSSVNCGTLPPPMSKIPADRYRVEGSFAQAPLSTQKRDWSRKAFGMQNLFGPHRNVRKTKEDKKSSKLGRGVALAQTSQRTSARRSFGRSRRFSLTRSLDDLESATVSDGELTGADLKDCISNNSLSSNASLPSVQSCRRLRERRVASWAVSFERLLQDPVGVRYFSDFLRKEFSEENILFWQACECFSHVPAHDKKELSYRAREIFSKFLCSKATTPVNIDSQAQLADDILNAPHPDMFKEQQLQIFNLMKFDSYTRFLKSQLYQECVLAEVEGRTLPDSQQVPSSPASKHSISSDHSNVSTPKKLSGKSKSGRSLNEDVGEEDSEKKRKGAFFSWSRSRSTGRSQKKKDHGDHAHDALHANGGLCRRESQGSVSSAGSLDLSEACRTSALERDKAAKHCCVHLPDGTSCVVAVKSGFSIKEILSGLCERHGINGAAVDLFLVGGDKPLVLHQDSSILATRDLRLGKRTLFRLDLVPINRSVGLKAKPTKPVTEVLRPVVAKYGLDLGSLLVRLSGEKEPLDLGAPISSLDGQRVILEERDPSRGKVSTEKQKGAPVKQSSAVNSSPRNHSAMGEERTLGKSNSIKIRGENGKSARDPRLSKREESIAKIGKKKYQKINLDEAEEFFELISKAQSNRADDQRGLLRKEDLVLPEFLRLPPGSSELALSSPPPVKGFSKRAVTSHGQEGAVQTEESYSDSPATSPASAQSPCSAYSPGSAHSPGSAHSPGSAHSTPGPPGTAQPGEKPTKPSCISTVQEGTTQAWRRLSPELEAGGIQTVEEEQVADLTLMGEGDISSPNSTLLPPPPLPQDTPGPTRPGTSRF

SEQ ID NO: 165 - protein, 2167 aa, Rattus norvegicus
MTHSPATSEDEERHSASECPEGGSESDSSPDGPGRGPQGTRGRGSGAPGNLASTRGLQGRSMSVPDDAHFSMMVFRIGIPDLHQTKCLRFNPDATIWTAKQQVLCALSESLQDVLNYGLFQPATSGRDANFLEEERLLREYPQSFEKGVPYLEFRYKTRVYKQTNLDEKQLAKLHTKTGLKKFLEYVQLGTSDKVARLLDKGLDPNYHDSDSGETPLTLAAQTEGSVEVIRTLCLGGAHIDFRARDGMTALHKAACARHCLALTALLDLGGSPNYKDRRGLTPLFHTAMVGGDPRCCELLLYNRAQLGIADENGWQEIHQACQRGHSQHLEHLLFYGAEPGAQNASGNTALHICALYNKETCARILLYRGANKDVKNNNGQTPFQVAVIAGNFELGELIRNHREQDVVPFQESPKYAARRRGPPGAGLTVPPALLRANSDTSMALPDWMVFSAPGASSSGTPGPTSGPQGQSQPSAPSTKLSSGTLRSASSPRGARARSPSRGRHPEDAKRQPRGRPSSSGTPRDGPAGGTGGSGGPGGSLGSRGRRRKLYSAVPGRSFMAVKSYQAQGEGEISLSKGEKIKVLSIGEGGFWEGQVKGRVGWFPSDCLEEVANRSQEGRQESRSDKAKRLFRHYTVGSYDSFDAPSLIDGIDSGSDYIIKEKTVLLQKKDSEGFGFVLRGAKAQTPIEEFTPTPAFPALQYLESVDEGGVAWRAGLRMGDFLIEVNGQNVVKVGHRQVVNMIRQGGNTLMVKVVMVTRHPDMDEAVHKKASQQAKRLPPPAISLRSKSMTSELEEMVSPWKKKIEYEQQPAAVPSMEKKRTVYQMALNKLDEILAAAQQTISASESPGPGGLASLGKHRPKGFFATESSFDPHHRSQPSYDRPSFLPPGPGLMLRQKSIGAAEDDRPYLAPPAMKFSRSLSVPGSEDIPPPPTTSPPEPPYSTPPAPSSSGRLTPSPRGGPFNPSSGGPLPASSPSSFDGPSPPDTRGGGREKSLYHSAALPPAHHHPPHHHHHHAPPPQPHHHHAHPPHPPEMETGGSPDDPPPRLALGPQPSLRGWRGGGPSPTSGAPSPSHHSSSGGSSGPTQAPALRYFQLPPRAASAAMYVPARSGRGRKGPLVKQTKVEGEPQKGSIPSASSPTSPALPRSEPPPAGPSEKNSIPIPTIIIKAPSTSSSGRSSQGSSTEAEPPTQPDGAGGGGSSPSPAPATSPVPPSPSPVPTPASPSGPATLDFTSQFGAALVGAARREGGWQNEARRRSTLFLSTDAGDEDGGDSGLGPGGPPGPRLRHSKSIDEGMFSAEPYLRLESGGSSGGYGAYAAGSRAYGGSGSSSAFTSFLPPRPLVHPLTGKALDPASPLGLALAARERALKESSEGGGTPQPPPRPPSPRYDAPPPTLHHHSPHSPHSPHARHEPVLRLWGDPARRELGYRAGLGSQEKALTASPPAARRSLLHRLPPTAPGVGPLLLQLGPEPPTPHPGVSKAWRTAAPEEPERLPLHVRFLENCQARPPPAGTRGSSTEDGPGVPPPSPRRVLPTSPTSPRGNEENGLPLLVLPPPAPSVDVDDGEFLFAEPLPPPLEFSNSFEKPESPLTPGPPHPLPDPPSPATPLPAAPPPAVAAAPPTLDSTASSLTSYDSEVATLTQGAPAAPGDPPAPGPPAPAAPAPPAPQPGPDPPPGTDSGIEEVDSRSSSDHPLETISSASTLSSLSAEGGGNTGGVAGGGAGVASGTELLDTYVAYLDGQAFGGSGTPGPPYPPQLMTPSKLRGRALGTSGNLRPGPSGGLRDPVTPTSPTVSVTGAGTDGLLALSACPGPSTAGVAGGPVAVEPEVPPVPLPAASSLPRKLLPWEEGPGPPPPPLPGPLSQPQASALATVKASIISELSSKLQQFGGSSTAGGALPWARGGSGGSTDSHHGGASYIPERTSSLQRQRLSEDSQTSLLSKPSSSIFQNWPKPPLPPLPTGSGVSSSTAAAPGATSPSASSASASTRHLQGVEFEMRPPLLRRAPSPSLLPASDHKVSPAPRPSSLPILPSGPIYPGLFDIRSSPTGGAGGSTDPFAPVFVPPHPGISGGLGGALSGASRSLSPTRLLSLPPDKPFGAKPLGFWTKFDVADWLEWLGLSEHRAQFLDHEIDGSHLPALTKEDYVDLGVTRVGHRMNIDRALKFFLER

SEQ ID NO: 166 - protein, 1839 aa, Rattus norvegicus
MPRSPTSSEDEMAQSFSDYSVGSESDSSKEETIYDTIRATTEKPGGVKMEDLQGNTLVIRVVIQDLQQTKCIRFNPDATVWVAKQRILCTLNQGLKDVLNYGLFQPASNGRDGKFLDEERLLREYPQPMGQGVPSLEFRYKKRVYKQSNLDEKQLARLHTKTNLKKFMDHTQHRSVEKLVKLLDRGLDPNFHDLETGETPLTLAAQLDGSMEVIKALRNGGAHLDFRSRDGMTALHKAARMRNQVALKTLLELGASPDYKDSYGLTPLYHTAIVGGDPYCCELLLHEHASVCCKDENGWHEIHQACRYGHVQHLEHLLFYGADMSAQNASGNTALHICALYNQDSCARVLLFRGGDKELKNYNSQTPFQVAIIAGNFELAEYIKNHKETDIVPFREAPAYSNRRRRPPNTLAAPRVLLRSNSDNNLNAGAPEWAVCSAATSHRSLSPQLLQQTPSKPDGATKSLGSYAPGPRSRSPSLNRLGGAGEDGKRPQPPHWHVGSPFTPGANKDSLSTFEYPGPRRKLYSAVPGRLFVAIKPYQPQVDGEIPLHRGDRVKVLSIGEGGFWEGSARGHIGWFPAECVEEVQCKPRDSQAETRADRSKKLFRHYTVGSYDSFDAASDCIIEDKTVVLQKKDNEGFGFVLRGAKADTPIEEFTPTPAFPALQYLESVDEGGVAWQAGLRTGDFLIEVNNENVVKVGHRQVVNMIRQGGNHLVLKVVTVTRNLDPDDTARKKAPPPPKRAPTTALTLRSKSMTAELEELDKPEEIVPASKPSRTAENVAIESRVATIKQRPTSRCFPAASDVNSVYERQGIAVMTPTVPGSPKGPFLGLPRGTMRRQKSIDSRIFLSGITEEERQFLAPPMLKFTRSLSMPDTSEDIPPPPQSVPPSPPPPSPTTYNCPRSPTPRVYGTIKPAFNQNPVAKVPPATRSDTVATMMREKGMFYRRELDRFSLDSEDVYSRSPAPQAAFRTKRGQMPENPYSEVGKIASKAVYVPAKPARRKGMLVKQSNVEDSPEKTCSIPIPTIIVKEPSTSSSGKSSQGSSMEIDPQATEPGQLRPDDSLTVSSPFAAAIAGAVRDREKRLEARRNSPAFLSTDLGDEDVGLGPPAPRMQPSKFPEEGGFGDEDETEQPLLPTPGAAPRELENHFLGGGEAGAQGEAGGPLSSTSKAKGPESGPAAALKSSSPASPENYVHPLTGRLLDPSSPLALALSARDRAMQESQQGHKGEAPKADLNKPLYIDTKMRPSVESGFPPVTRQNTRGPLRRQETENKYETDLSKDRRADDKKNMLINIVDTAQQKSAGLLMVHTVDIPVAGPPLEEEEDREDGDTKPDHSPSTVPEGVPKTEGALQISAAPEPAAAPGRTIVAAGSVEEAVILPFRIPPPPLASVDLDEDFLFTEPLPPPLEFANSFDIPDDRAASVPALADLVKQKKSDTPQPPSLNSSQPANSTDSKKPAGISNCLPSSFLPPPESFDAVTDSGIEEVDSRSSSDHHLETTSTISTVSSISTLSSEGGESMDTCTVYADGQAFVVDKPPVPPKPKMKPIVHKSNALYQDTLPEEDTDGFVIPPPAPPPPPGSAQAGVAKVIQPRTSKLWGDVTEVKSPILSGPKANVISELNSILQQMNRGKSVKPGEGLELPVGAKSANLAPRSPEVMSTVSGTRSTTVTFTVRPGTSQPITLQSRPPDYESRTSGPRRAPSPVVSPTELSKEILPTPPSAAAASPSPTLSDVFSLPSQSPAGDLFGLNPAGRSRSPSPSILQQPISNKPFTTKPVHLWTKPDVADWLESLNLGEHKETFMDNEIDGSHLPNLQKEDLIDLGVTRVGHRMNIERALKQLLDR

SEQ ID NO: 167 - protein, 1740 aa, Rattus norvegicus
MDGPGASAVVVRVGIPDLQQTKCLRLDPTAPVWAAKQRVLCALNHSLQDALNYGLFQPPSRGRAGKFLDEERLLQDYPPNLDTPLPYLEFRYKRRVYAQNLIDDKQFAKLHTKANLKKFMDYVQLHSTDKVARLLDKGLDPNFHDPDSGECPLSLAAQLDNATDLLKVLRNGGAHLDFRTRDGLTAVHCATRQRNAGALTTLLDLGASPDYKDSRGLTPLYHSALGGGDALCCELLLHDHAQLGTTDENGWQEIHQACRFGHVQHLEHLLFYGANMGAQNASGNTALHICALYNQESCARVLLFRGANKDVRNYNSQTAFQVAIIAGNFELAEVIKTHKDSDVVPFRETPSYAKRRRLAGPSGLASPRPLQRSASDINLKGDQPAASPGPTLRSLPHQLLLQRLQEEKDRDRDGEQENDISGPSAGRGGHSKISPSGPGGSGPAPGPGPASPAPPAPPPRGPKRKLYSAVPGRKFIAVKAHSPQGEGEIPLHRGEAVKVLSIGEGGFWEGTVKGRTGWFPADCVEEVQMRQYDTRHETREDRTKRLFRHYTVGSYDSLTSHSDYVIDDKVAILQKRDHEGFGFVLRGAKAETPIEEFTPTPAFPALQYLESVDVEGVAWKAGLRTGDFLIEVNGVNVVKVGHKQVVGLIRQGGNRLVMKVVSVTRKPEEDSARRRAPPPPKRAPSTTLTLRSKSMTAELEELASIRRRKGEKLDEILAVAAEPTLRPDIADADSRAATVKQRPTSRRITPAEISSLFERQGLPGPEKLPGSLRKGIPRTKSVGEDEKLASLLEGRFPRSTSMQDTVREGRGIPPPPQTAPPPPPAPYYFDSGPPPTFSPPPPPPGRAYDTVRSSFKPGLEARLGAGAAGLYDSGTPLGPLPYPERQKRARSMIILQDSAPEVGDVPRPAPAATPPERPKRRPRPSGPDSPYANLGAFSASLFAPSKPQRRKSPLVKQLQVEDAQERAALAVGSPGPVGGSFAREPSPTHRGPRPGGLDYSSGEGLGLTFGGPSPGPVKERRLEERRRSTVFLSVGAIEGNPPSADLPSLQPSRSIDERLLGTGATTGRDLLLPSPVSALKPLVGGPNLGPSSSTFIHPLTGKPLDPSSPLALALAARERALASQTPSRSPTPVHSPDADRPGPLFVDVQTRDSERGPLASPAFSPRSPAWIPVPARREAEKPTREERKSPEDKKSMILSVLDTSLQRPAGLIVVHATSNGQEPNRLGAEEERPGTPELAPTPMQAAAVAEPMPSPRAQPPGNIPADPGPSQGNSEEEPKLVFAVNLPPAQLSSNDEETREELARIGLVPPPEEFANGILLATPPPGPGPLPTTVPSPASGKPSSELPPAPESAADSGVEEADTRSSSDPHLETTSTISTVSSMSTLSSESGELTDTHTSFADGHTFLLEKPPVPPKPKLKSPLGKGPVTFRGPLLKQSSDSELMAQQHHATSTGLTSAAGPARPRYLFQRRSKLWGDPVESRGLPGPEDDKPTVISELSSRLQQLNKDTRSLGEEPVGGLGSLLDPAKKSPIAAARCAVVPSAGWLFSSLGELSTISAQRSPGGPGGGASYSVRPSGRYPVARRAPSPVKPASLERVEGLGAGVGGAGRPFGLTPPTILKSSSLSIPHEPKEVRFVVRSASARSRSPSPSPLPSPSPGSGPSAGPRRPFQQKPLQLWSKFDVGDWLESIHLGEHRDRFEDHEIEGAHLPALTKEDFVELGVTRVGHRMNIERALRQLDGS

SEQ ID NO: 168 - protein, 394 aa, Rattus norvegicus
MTLRRLRKLQQKEEATAAPDLAGRAPDSEAARAAPTPSGPPAAAAPPGAPGDELYAALEDYHPAELYRALAVSGGTLPRRKGSGFRWKNFTQSPEQQRKVLTLEKGDNQTFGFEIQTYGLHHREEQRVEMVTFVCRVHESSPAQLAGLTPGDTIASVNGLNVEGIRHREIVDIIKASGNVLRLETLYGTSIRKAELEARLQYLKQTLYEKWGEYRSLMVQEQRLVHGLVVKDPSIYDTLESVRSCLYGAGLLPGSLPFGPLLAAPGGARGGSRRAKGDTDDAVYHTCFFGGAEPQALPPPPPPARAPGPGSAETPASVLCPAPRATLSRSASVRCAGPGGGGGGGAPGALWTEAREQALCGAGLRKTKYRSFRRRLLKFIPGLNRSLEEEESQL

SEQ ID NO: 169 - protein, 1553 aa, Rattus norvegicus
MSSAVGPRGPRPPTVPPPMQELPDLSHLTEEERNIIMAVMDRQKEEEEKEEAMLKCVVRDMAKPAACKTPRNAESQPHQPPLNIFRCVCVPRKPSSEEGGPERDWRLHQQFESYKEQVRKIGEEARRYQGEHKDDAPTCGICHKTKFADGCGHLCSYCRTKFCARCGGRVSLRSNNEDKVVMWVCNLCRKQQEILTKSGAWFFGSGPQQPSQDGTLSDTATGAGSEVPREKKARLQERSRSQTPLSTAAVSSQDTATPGAPLHRNKGAEPSQQALGPEQKQASRSRSEPPRERKKAPGLSEQNGKGGQKSERKRVPKSVVQPGEGIADERERKERRETRRLEKGRSQDYSDRPEKRDNGRVAEDQKQRKEEEYQTRYRSDPNLARYPVKAPPEEQQMRMHARVSRARHERRHSDVALPHTEAAAAAPAEATAGKRAPATARVSPPESPRARAAAAQPPTEHGPPPPRPAPGPAEPPEPRVPEPLRKQGRLDPGSAVLLRKAKREKAESMLRNDSLSSDQSESVRPSPPKPHRPKRGGKRRQMSVSSSEEEGVSTPEYTSCEDVELESESVSEKGDLDYYWLDPATWHSRETSPISSHPVTWQPSKEGDRLIGRVILNKRTTMPKESGALLGLKVVGGKMTDLGRLGAFITKVKKGSLADVVGHLRAGDEVLEWNGKPLPGATNEEVYNIILESKSEPQVEIIVSRPIGDIPRIPESSHPPLESSSSSFESQKMERPSISVISPTSPGALKDAPQVLPGQLSVKLWYDKVGHQLIVNVLQATDLPPRVDGRPRNPYVKMYFLPDRSDKSKRRTKTVKKLLEPKWNQTFVYSHVHRRDFRERMLEITVWDQPRVQDEESEFLGEILIELETALLDDEPHWYKLQTHDESSLPLPQPSPFMPRRHIHGESSSKKLQRSQRISDSDISDYEVDDGIGVVPPVGYRASARESKATTLTVPEQQRTTHHRSRSVSPHRGDDQGRPRSRLPNVPLQRSLDEIHPTRRSRSPTRHHDASRSPADHRSRHVESQYSSEPDSELLMLPRAKRGRSAESLHMTSELQPSLDRARSASTNCLRPDTSLHSPERERHSRKSERCSIQKQSRKGTASDADRTHRQGSPTQSPPADTSFGSRRGRQLPQVPVRSGSIEQASLVVEERTRQMKVKVHRFKQTTGSGSSQELDHEQYSKYNIHKDQYRSCDNASAKSSDSDVSDVSAISRASSTSRLSSTSFMSEQSERPRGRISSFTPKMQGRRMGTSGRAIIKSTSVSGEIYTLERNDGSQSDTAVGTVGAGGKKRRSSLSAKVVAIVSRRSRSTSQLSQTESGHKKLKSTIQRSTETGMAAEMRKMVRQPSRESTDGSINSYSSEGNLIFPGVRVGPDSQFSDFLDGLGPAQLVGRQTLATPAMGDIQIGMEDKKGQLEVEVIRARSLTQKPGSKSTPAPYVKVYLLENGACIAKKKTRIARKTLDPLYQQSLVFDESPQGKVLQVIVWGDYGRMDHKCFMGVAQILLEELDLSSMVIGWYKLFPPSSLVDPTLAPLTRRASQSSLESSSGPPCIRS

SEQ ID NO: 170 - protein, 849 aa, Rattus norvegicus
MHKHQHCCKCPECYEVTRLAALRRLEPPGYGDWQVPDPYGPSGGNGASSGYGGYSSQTLPSQAGATPTPRTKAKLIPTGRDVGPVPPKPVPGKNTPKLNGSGPSWWPECTCTNRDWYEQASPAPLLVNPEALEPSLSVNGSDGMFKYEEIVLERGNSGLGFSIAGGIDNPHVPDDPGIFITKIIPGGAAAMDGRLGVNDCVLRVNEVDVSEVVHSRAVEALKEAGPVVRLVVRRRQPPPETIMEVNLLKGPKGLGFSIAGGIGNQHIPGDNSIYITKIIEGGAAQKDGRLQIGDRLLAVNNTNLQDVRHEEAVASLKNTSDMVYLKVAKPGSLHLNDMYAPPDYASTFTALADNHISHNSSLGYLGAVESKVTYPAPPQVPPTRYSPIPRHMLAEEDFTREPRKIILHKGSTGLGFNIVGGEDGEGIFVSFILAGGPADLSGELRRGDRILSVNGVNLRNATHEQAAAALKRAGQSVTIVAQYRPEEYSRFESKIHDLREQMMNSSMSSGSGSLRTSEKRSLYVRALFDYDRTRDSCLPSQGLSFSYGDILHVINASDDEWWQARLVTPHGESEQIGVIPSKKRVEKKERARLKTVKFHARTGMIESNRDFPGLSDDYYGAKNLKGVTSNTSDSESSSKGQEDAILSYEPVTRQEIHYARPVIILGPMKDRVNDDLISEFPHKFGSCVPHTTRPRRDNEVDGQDYHFVVSREQMEKDIQDNKFIEAGQFNDNLYGTSIQSVRAVAERGKHCILDVSGNAIKRLQQAQLYPIAIFIKPKSIEALMEMNRRQTYEQANKIFDKAMKLEQEFGEYFTAIVQGDSLEEIYNKIKQIIEDQSGHYIWVPSPEKL

SEQ ID NO: 171 - protein, 911 aa, Rattus norvegicus
MPVRKQDTQRALHLLEEYRSKLSQTEDRQLRSSIERVISIFQSNLFQALIDIQEFYEVTLLDNPKCVDHSKQCEPVQPGNPWESGSLSSAAVTSESLPGGLSPPVEKYRYQDEEVLPSERISPQVPNEVLGPELVHVSEKSLSEIENVHGFVSHSHISPIKPTEAVPPSSPIVPVTPALPVPAESPVVLPSTPQANPPPVLVNTDSLETPTYVNGTDADYEYEEITLERGNSGLGFSIAGGTDNPHIGDDSSIFITKIITGGAAAQDGRLRVNDCILRVNEADVRDVTHSKAVEALKEAGSIVRLYVKRRKAFRKNHEIKLIKGPKGLGFSIAGGVGNQHIPGDNSIYVTKIIEGGAAHKDGKLQIGDKLLAVNSVCLEEVTHEEAVTALKNTSDFVYLKAAKPTSMYINDGYAPPDITNSSSQSVDNHVSPSSYLGQTPASPARYSPISKAVLGDDEITREPRKVVLHRGSTGLGFNIVGGEDGEGIFISFILAGGPADLSGELRKGDRIISVNSVDLRAASHEQAAAALKNAGQAVTIVAQYRPEEYSRFEAKIHDLRETMMNSSVSSGSGSLRTSQKRSLYVRALFDYDKTKDSGLPSQGLNFKFGDILHVINASDDEWWQARQVTPDGESDEVGVIPSKRRVEKKERARLKTVKFNSKTRGDKGEIPDDMGSKGLKHVTSNASDSESSYHEYGCSKGGQEEYVLSYEPVNQQEVNYTRPVIILGPMKDRVNDDLISEFPDKFGSCVPHTTRPKRDYEVDGRDYHFVTSREQMEKDIQEHKFIEAGQYNNHLYGTSVQSVRAVAEKGKHCILDVSGNAIKRLQIAQLYPISIFIKPKSMENIMEMNKRLTDEQARKTFERAVRLEQEFTEHFTAIVQGDTLEDIYNQVKQIIEEQSGPYIWVPAKEKL

SEQ ID NO: 172 - protein, 2054 aa, Rattus norvegicus
MLETIDKNRALQAAERLQSKLKERGDVANEDKLSLLKSVLQSPLFSQILSLQTSLQQLKDQVNVATLATANADHAHTPQFSSAIISNLQSESLLLSPSNGNLEAISGPGAPPAMDGKPACEELDQLIKSMAQGRHVEIFELLKPPCGGLGFSVVGLRSENRGELGIFVQEIQEGSVAHRDGRLKETDQILAINGQVLDQTITHQQAISILQKAKDTIQLVIARGSLPHISSPRISRSPSAASTVSAHSNPTHWQHVETIELVNDGSGLGFGIIGGKATGVIVKTILPGGVADQHGRLCSGDHILKIGDTDLAGMSSEQVAQVLRQCGNRVKLMIARGAVEETPAPSSLGITLSSSTSTSEMRVDASTQKNEESETFDVELTKNVQGLGITIAGYIGDKKLEPSGIFVKSITKSSAVELDGRIQIGDQIVAVDGTNLQGFTNQQAVEVLRHTGQTVRLTLMRKGASQEAEITSREDTAKDVDLPAENYEKDEESLSLKRSTSILPIEEEGYPLLSTELEETEDVQQEAALLTKWQRIMGINYEIVVAHVSKFSENSGLGISLEATVGHHFIRSVLPEGPVGHSGKLFSGDELLEVNGINLLGENHQDVVNILKELPIDVTMVCCRRTVPPTALSEVDSLDIHDLELTEKPHIDLGEFIGSSETEDPMLAMSDVDQNAEEIQTPLAMWEAGIQAIELEKGSRGLGFSILDYQDPIDPANTVIVIRSLVPGGIAEKDGRLFPGDRLMFVNDINLENSTLEEAVEALKGAPSGMVRIGVAKPLPLSPEEGYVSAKEDTFLCSPHTCKEMGLSDKALFRADLALIDTPDAESVAESRFESQFSPDNDSVYSTQASVLSLHDGACSDGMNYGPSLPSSPPKDVTNSSDLVLGLHLSLEELYTQNLLQRQHAGSPPTDMSPAATSGFTVSDYTPANAVEQKYECANTVAWTPSQLPSGLSTTELAPALPAVAPKYLTEQSSLVSDAESVTLQSMSQEAFERTVTIAKGSSSLGMTVSANKDGLGVIVRSIIHGGAISRDGRIAVGDCILSINEESTISLTNAQARAMLRRHSLIGPDIKITYVPAEHLEEFRVSFGQQAGGIMALDIFSSYTGRDIPELPEREEGEGEESELQNAAYSSWSQPRRVELWREPSKSLGISIVGGRGMGSRLSNGEVMRGIFIKHVLEDSPAGKNGTLKPGDRIVEVDGMDLRDASHEQAVEAIRKAGSPVVFMVQSIVNRPRKSPLPSLPHSLYPKCSFSSTNPFAESLQLTSDKAPSQSESESEKATLCSVPSSSPSVFSEMSSDYAQPSATTVAEDEDKEDEFGYSWKNIQERYGTLTGQLHMIELEKGHSGLGLSLAGNKDRTRMSVFIVGIDPTGAAGRDGRLQIADELLEINGQILYGRSHQNASSIIKCAPSKVKIIFIRNADAVNQMAVCPGSAADPLPSTSESPQNKEVEPSITTSASAVDLSSLTNVYHLELPKDQGGLGIAICEEDTLNGVTIKSLTERGGAAKDGRLKPGDRILAVDDELVAGCPIEKFISLLKTAKTTVKLTVGAENPGCQAVPSAAVTASGERKDSSQTPAVPAPDLEPIPSTSRSSTPAIFASDPATCPIIPGCETTIEISKGQTGLGLSIVGGSDTLLGAIIIHEVYEEGAACKDGRLWAGDQILEVNGIDLRKATHDEAINVLRQTPQRVRLTLYRDEAPYKEEDVCDTFTVELQKRPGKGLGLSIVGKRNDTGVFVSDIVKGGIADADGRLMQGDQILMVNGEDVRNATQEAVAALLKCSLGTVTLEVGRIKAAPFHSERRPSQSSQVSESSLSSFSLPRSGIHTSESSESSAKKNALASEIQGLRTVEIKKGPADALGLSIAGGVGSPLGDVPIFIAMMHPNGVAAQTQKLRVGDRIVTICGTSTDGMTHTQAVNLMKNASGSIEVQVVAGGDVSVVTGHQQELANPCLAFTGLTSSTIFPDDLGPPQSKTITLDRGPDGLGFSIVGGYGSPHGDLPIYVKTVFAKGAAAEDGRLKRGDQIIAVNGQSLEGVTHEEAVAILKRTKGTVTLMVLS

SEQ ID NO: 173 - protein, 1095 aa, Rattus norvegicus
MLKAESSGERTTLRSASPHRNAYRTEFQALKSTFDKPKPDGEQKTKEGEGSQQSRGRKYGSNVNRIKNLFMQMGMEPNENAAIIAKTRGKGRPSSPQKRMKPKEFVEKTDGSVVKLESSVSERISRFDTMHDGPSYAKFTETRKMFERSGHESGQNNRHSPKKEKAGEAEPQDEWGGSKSNRGSSDSLDSLSPRTEAVSPTVSQLSAVFENSESPGAITPGKAENSNYSVTGHYPLNLPSVTVTNLDTFGRLKDSNSRPSSNKQATDTEEPEKSEAVPVPEVAQKGTSLASLPSEERQLSTEAEDVTAQPDTPDSTDKDSPGEPSAESQAMPKSNTLSRPKEPLEDAEANVVGSEAEQPQRRDLTGGGDLTSPDASASSCGKEVPEDSNSFEGSHVYMHSDYNVYRVRSRYNSDWGETGTEQDEGDDSDENNYYQPDMEYSEIVGLPQEEEIPANRKIKFSCAPIKVFNTYSNEDYDRRNDDVDPVAASAEYELEKRVEKLELFPVELEKDEDGLGISIIGMGVGADAGLEKLGIFVKTVTEGGAAQRDGRIQVNDQIVEVDGISLVGVTQNFAATVLRNTKGNVRFVIGREKPGQVSEVAQLISQTLEQERRQRELLERHYAQYDADDDETGEYATDEEEDEVGPILPGGDMAIEVFELPENEDMFSPSDLDTSKLSHKFKELQIKHAVTEAEIQKLKTKLQAAENEKVRWELEKNQLQQNIEENKERMVKLESYWIEAQTLCHTVNEHLKETQSQYQALEKKYNKAKKLIKDFQQKELDFIRRQEVERKKLEEVEKAHLVEVQGLQVRIRDLEAEVFRLLKQNGTQVNNNNNIFERRPSPGEVSKGDTMENVEVKQTSCQDGLSQDLNEAVPETERLDSKALKTRAQLSVKNRRQRPTRTRLYDSVSSTDGEDSLERKNFTFNDDFSPSSTSSADLSGLGAEPKTPGLSQSLALSSDESLDMIDDEILDDGQSPKHTQSQSRAVHEWSVQQVSHWLVGLSLDQYVSEFSAQNISGEQLLQLDGNKLKALGMTSSQDRALVKKKLKEMKMSLEKARKAQEKMEKQREKLRRKEQEQMQRKSKKSEKMTSTTEQP

SEQ ID NO: 174 - protein, 145 aa, Rattus norvegicus
MNGRVDYLVSEEEINLTRGPSGLGFNIVGGTDQQYVSNDSGIYVSRIKEDGAAARDGRLQEGDKILSVNGQDLKNLLHQDAVDLFRNAGYAVSLRVQHRLPVQNGPIVHRGDGEPSGVPVAVVLLPVFALTLVAVWAFVRYRKQL

SEQ ID NO: 175 - protein, 416 aa, Rattus norvegicus
MFADLDYDIEEDKLGIPTVPGKVTLQKDAQNLIGISIGGGAQYCPCLYIVQVFDNTPAALDGTVAAGDEITGVNGRSIKGKTKVEVAKMIQEVKGEVTIHYNKLQADPKQGMSLDIVLKKVKHRLVENMSSGTADALGLSRAILCNDGLVKRLEELERTAELYKGMTEHTKNLLRAFYELSQTHRAFGDVFSVIGVREPQPAASEAFVKFADAHRSIEKFGIRLLKTIKPMLTDLNTYLNKAIPDTRLTIKKYLDVKFEYLSYCLKVKEMDDEEYSCIALGEPLYRVSTGNYEYRLILRCRQEARARFSQMRKDVLEKMELLDQKHVQDIVFQLQRFVSTMSKYYNDCYAVLRDADVFPIEVDLAHTTLAYGPNQGGFTDGEDEEEEEEDGAAREVSKDARGATGPTDKGGSWCDS

SEQ ID NO: 176 - protein, 852 aa, Rattus norvegicus
MFFACYCALRTNVKKYRYQDEDGPHDHSLPRLTHEVRGPELVHVSEKNLSQIENVHGYVLQSHISPLKASPAPIIVNTDTLDTIPYVNGTEIEYEFEEITLERGNSGLGFSIAGGTDNPHIGDDPGIFITKIIPGGAAAEDGRLRVNDCILRVNEVDVSEVSHSKAVEALKEAGSIVRLYVRRRRPILETVVEIKLFKGPKGLGFSIAGGVGNQHIPGDNSIYVTKIIDGGAAQKDGRLQVGDRLLMVNNYSLEEVTHEEAVAILKNTSDVVYLKVGKPTTIYMTDPYGPPDITHSYSPPMENHLLSGNNGTLEYKTSLPPISPGRYSPIPKHMLVEDDYTRPPEPVYSTVNKLCDKPASPRHYSPVECDKSFLLSTPYPHYHLGLLPDSDMTSHSQHSTATRQPSVTLQRAISLEGEPRKVVLHKGSTGLGFNIVGGEDGEGIFVSFILAGGPADLSGELQRGDQILSVNGIDLRGASHEQAAAALKGAGQTVTIIAQYQPEDYARFEAKIHDLREQMMNHSMSSGSGSLRTNQKRSLYVRAMFDYDKSKDSGLPSQGLSFKYGDILHVINASDDEWWQARRVILDGDSEEMGVIPSKRRVERKERARLKTVKFNAKPGVIDSKGDIPGLGDDGYGTKTLRGQEDLILSYEPVTRQEINYTRPVIILGPMKDRINDDLISEFPDKFGSCVPHTTRPKRDYEVDGRDYHFVISREQMEKDIQEHKLIEAGQYNDNLYGTSVQSVRFVAVRGKHCILDVSGNAIKRLQVAQLYPIAIFIKPKSLEPLMEMNKRLTEEQAKKTYDRAIKLEQEFGEYFTAIVQGDTLEDIYNQCKLVIEEQSGPFIWIPSKEKL

SEQ ID NO: 177 - protein, 724 aa, Rattus norvegicus
MDCLCIVTTKKYRYQDEDTPPLEHSPAHLPNQANSPPVIVNTDTLEAPGYELQVNGTEGEMEYEEITLERGNSGLGFSIAGGTDNPHIGDDPSIFITKIIPGGAAAQDGRLRVNDSILFVNEVDVREVTHSAAVEALKEAGSIVRLYVMRRKPPAEKVMEIKLIKGPKGLGFSIAGGVGNQHIPGDNSIYVTKIIEGGAAHKDGRLQIGDKILAVNSVGLEDVMHEDAVAALKNTYDVVYLKVAKPSNAYLSDSYAPPDITTSYSQHLDNEISHSSYLGTDYPTAMTPTSPRRYSPVAKDLLGEEDIPREPRRIVIHRGSTGLGFNIVGGEDGEGIFISFILAGGPADLSGELRKGDQILSVNGVDLRNASHEQAAIALKNAGQTVTIIAQYKPEEYSRFEAKIHDLREQLMNSSLGSGTASLRSNPKRGFYIRALFDYDKTKDCGFLSQALSFRFGDVLHVIDAGDEEWWQARRVHSDSETDDIGFIPSKRRVERREWSRLKAKDWGSSSGSQGREDSVLSYETVTQMEVHYARPIIILGPTKDRANDDLLSEFPDKFGSCVPHTTRPKREYEIDGRDYHFVSSREKMEKDIQAHKFIEAGQYNSHLYGTSVQSVREVAEQGKHCILDVSANAVRRLQAAHLHPIAIFIRPRSLENVLEINKRITEEQARKAFDRATKLEQEFTECFSAIVEGDSFEEIYHKVKRVIEDLSGPYIWVPARERL

SEQ ID NO: 178 - protein, 839 aa, Rattus norvegicus
MNHLEGSAEVEVADEAPGGEVNESVEADLEHPEVEEEQQPSPPPPAGHAPEDHRAHPAPPPPPPPQEEEEERGECLARSASTESGFHNHTDTAEGDVLAAARDGYEAERAQDADDESAYAVQYRPEAEEYTEQAEAEHAEAAQRRALPNHLHFHSLEHEEAMNAAYSGYVYTHRLFHRAEDEPYAEPYADYGGLQEHVYEEIGDAPELEARDGLRLYERERDEAAAYRQEALGARLHHYDERSDGESDSPEKEAEFAPYPRMDSYEQEEDIDQIVAEVKQSMSSQSLDKAAEDMPEAEQDLERAPTPGGGHPDSPGLPAPAGQQQRVVGTPGGSEVGQRYSKEKRDAISLAIKDIKEAIEEVKTRTIRSPYTPDEPKEPIWVMRQDISPTRDCDDQRPVDGDSPSPGSSSPLGAESSITPLHPGDPTEASTNKESRKSLASFPTYVEVPGPCDPEDLIDGIIFAANYLGSTQLLSDKTPSKNVRMMQAQEAVSRIKTAQKLAKSRKKAPEGESQPMTEVDLFISTQRIKVLNADTQEPMMDHPLRTISYIADIGNIVVLMARRRMPRSNSQENVEASHPSQDAKRQYKMICHVFESEDAQLIAQSIGQAFSVAYQEFLRANGINPEDLSQKEYSDLLNTQDMYNDDLIHFSKSENCKDVFIEKQKGEILGVVIVESGWGSILPTVIIANMMHGGPAEKSGKLNIGDQIMSINGTSLVGLPLSTCQSIIKGLKNQSRVKLNIVRCPPVTTVLIRRPDLRYQLGFSVQNGIICSLMRGGIAERGGVRVGHRIIEINGQSVVATPHEKIVHILSNAVGEIHMKTMPAAMYRLLTAQEQPVYI

SEQ ID NO: 179 - protein, 750 aa, Rattus norvegicus
MAHRKRQSTASSMLDHRARPGPIPHDQEPENEDTELPLESYVPTGLELGTLRPDSPTPEEQECHNHSPDGDSSSDYVNNTSEEEDYDEGLPEEEEGVTYYIRYCPEDDSYLEGMDCNGEEYLAHGAHPVDTDECQEAVEDWTDSVGPHTHSHGAENSQEYPDSHLPIPEDDPTVLEVHDQEEDGHYCPSKESYQDYYPPETNGNTGGASPYRMRRGDGDLEEQEEDIDQIVAEIKMSLSMTSITSASEASPEHMPELDPGDSTEACSPSDTGRGPSRQEARPKSLNLPPEVKHSGDPQRGLKTKTRTPEERPKWPQEQVCNGLEQPRKQQRSDLNGPTDNNNIPETKKVASFPSFVAVPGPCEPEDLIDGIIFAANYLGSTQLLSERNPSKNIRMMQAQEAVSRVKRMQKAAKIKKKANSEGDAQTLTEVDLFISTQRIKVLNADTQETMMDHALRTISYIADIGNIVVLMARRRMPRSASQDCIETTPGAQEGKKQYKMICHVFESEDAQLIAQSIGQAFSVAYQEFLRANGINPEDLSQKEYSDIINTQEMYNDDLIHFSNSENCKELQLEKHKGEILGVVVVESGWGSILPTVILANMMNGGPAARSGKLSIGDQIMSINGTSLVGLPLATCQGIIKGLKNQTQVKLNIVSCPPVTTVLIKRPDLKYQLGFSVQNGIICSLMRGGIAERGGVRVGHRIIEINGQSVVATAHEKIVQALSNSVGEIHMKTMPAAMFRLLTGQETPLYI

SEQ ID NO: 180 - protein, 569 aa, Rattus norvegicus
MEFLPEPQHPPGPPTMDLEEPKGPEVPSEDHPSNTQGALGPRGPDTLSEMELDTSSVRALVQQLEALPSDLGGQFPDGAPCPLHIATGQGLATQENLDAGGLLSAEAGGDNLLGLLRCEASLPAQSVPPDPAQAAPRLLQPPEDPGGDPGWMEGTEPADNRSSSSSPELWLETAPLVTHRDPPVGTQSQETLASCPAVSEVPGPCGQEELMDGVLFGAKYLGSTQLLSERNPPPSTRMGQAQEAMDRVKAPEGESQPMTEVDIFISTKRVKVLAADSQDALMDHALQTISYIADIGPVLVLMARRRLAKRTTSQDRQRQLYKMLCHVFHSEDAQLIAQAIGQAFSIAYSQFLQENGIDPSQVGMQPSASASHPHNGDLDHFCNSQNCREVCIQKRPGEGLGVALVESGWGSLLPTAVIANLLHGGPAERCGALSIGDRVTAINGTSLVGLSLAACQAAVREVRRHSSVTLSIIHCPPVTTAVIHRPHVREQLGFCVENGIICSLLRGSAAERGGVRVGHRIIEVNGQSVVAMPHARIIQLLTETREIHIKTMPAATYRLLTGQEQPVYL

SEQ ID NO: 181 - protein, 1463 aa, Rattus norvegicus
MEENTFGVQQIQPNVISVRLFKRKVGGLGFLVKERVSKPPVIISDLIRGGAAEQSGLIQAGDIILAVNDRPLVDLSYDSALEVLRGIASETHVVLILRGPEGFTTHLETTFTGDGTPKTIRVTQPLGPPTKAVDLSHQPSASKDQSLAVDRVTGLGNGPQHAQGHGQGAGSVSQANGVAIDPTMKSTKANLQDIGEHDELLKEIEPVLSILNSGSKATNRGGPAKAEMKDTGIQVDRDLDGKSHKAPPLGGDNDRVFNDLWGKDNVPVVLNNPYSEKEQSPTSGKQSPTKNGSPSRCPRFLKVKNWETDVVLTDTLHLKSTLETGCTEHICMGSIMLPSQHTRKPEDVRTKDQLFPLAKEFLDQYYSSIKRFGSKAHMDRLEEVNKEIESTSTYQLKDTELIYGAKHAWRNASRCVGRIQWSKLQVFDARDCTTAHGMFNYICNHVKYATNKGNLRSAITIFPQRTDGKHDFRVWNSQLIRYAGYKQPDGSTLGDPANVQFTEICIQQGWKAPRGRFDVLPLLLQANGNDPELFQIPPELVLEVPIRHPKFDWFKDLGLKWYGLPAVSNMLLEIGGLEFSACPFSGWYMGTEIGVRDYCDNSRYNILEEVAKKMDLDMRKTSSLWKDQALVEINIAVLYSFQSDKVTIVDHHSATESFIKHMENEYRCRGGCPADWVWIVPPMSGSITPVFHQEMLNYRLTPSFEYQPDPWNTHVWKGTNGTPTKRRAIGFKKLAEAVKFSAKLMGQAMAKRVKATILYATETGKSQAYAKTLCEIFKHAFDAKAMSMEEYDIVHLEHEALVLVVTSTFGNGDPPENGEKFGCALMEMRHPNSVQEERKYPEPLRFFPRKGPSLSHVDSEAHSLVAARDSQHRSYKVRFNSVSSYSDSRKSSGDGPDLRDNFESTGPLANVRFSVFGLGSRAYPHFCAFGHAVDTLLEELGGERILKMREGDELCGQEEAFRTWAKKVFKAACDVFCVGDDVNIEKANNSLISNDRSWKRNKFRLTYVAEAPDLTQGLSNVHKKRVSAARLLSRQNLQSPKSSRSTIFVRLHTNGNQELQYQPGDHLGVFPGNHEDLVNALIERLEDAPPANHVVKVEMLEERNTALGVISNWKDESRLPPCTIFQAFKYYLDITTPPTPLQLQQFASLATNEKEKQRLLVLSKGLQEYEEWKWGKNPTMVEVLEEFPSIQMPATLLLTQLSLLQPRYYSISSSPDMYPDEVHLTVAIVSYHTRDGEGPVHHGVCSSWLNRIQADDVVPCFVRGAPSFHLPRNPQVPCILVGPGTGIAPFRSFWQQRQFDIQHKGMNPCPMVLVFGCRQSKIDHIYREETLQAKNKGVFRELYTVYSREPDRPKKYVQDVLQEQLAESVYRALKEQGGHIYVCGDVTMAADVLKAIQRIMTQQGKLSEEDAGVFISRLRDDNRYHEDIFGVTLRTYEVTNRLRSESIAFIEESKKDADEVFSS

SEQ ID NO: 182 - protein, 427 aa, Synechocystis PCC6803
MGKRTRRFWALAFSLLMGALIYLGNTPSALAFTEEQKLLLQSWRLVNQSYLDETFNHQNWWLLREKYVKRPLRNREETYTAIEEMLATLDEPFTRLLRPEQYGNLQVTTTGELSGVGLQININPETNQLEIMAPLAGSPAEEAGLQPHDQILAIDGVDTQTLSLDEAAARMRGPKNTKVSLEILSAGTEVPQEFTLTRQLISLSPVAAQLDDSRPGQSVGYIRLSQFSANAYKEVAHALHQLEEQGADGYILDLRNNPGGLLQAGIDIARLWLPESTIVYTVNRQGTQESFTANGEAATDRPLVVLVNQGTASASEILAGALQDNQRATLVGEKTFGKGLIQSLFELSDGAGIAVTVAKYETPQHHDIHKLGIMPDEVVEQPLISFAEITSPADVQYQAALDLLTGGVAIAHKSSSIPAMATAHKPN

SEQ ID NO: 183 - protein, 331 aa, Xenopus laevis
MPLGLRVKKKNKSKEVSSKLVDSDEIANRASGSAGKVSSSANGAAGLPPPPVNLRPKLVFHTQLAHGSPTGRIEGFTNVKELYSKIAEAFLITPEEILFCTLNTHKIDMDKLLGGQIGLEDFIFAHVKGTKKEVEVLKSEDALGLTITDNGAGVAFIKRIKEESTIDKVKVINVGDHIEAINGKNIVGSRHYEVAKMLKELEKGQPFTLKLIEPLKAFEMIEPRARGGKTEGKISTGRETLRLRSKGPATVEEMPSVFEEKAIKKVDDLLESYMGIRDIELAATMVEAGRDKKNPDEFAVALDEALGDFAFPDEFVFDVWGAIGDAKQGRF

SEQ ID NO: 184 - protein, 20 aa, Caenorhabditis elegans
EEAEAVQYENEEVSQKETCL

SEQ ID NO: 185 - protein, 20 aa, Drosophila melanogaster
EVVDPKSNKFVLKLNSETSV

SEQ ID NO: 186 - protein, 20 aa, Drosophila melanogaster
NKYVAAPVANPPLPSFETAL

SEQ ID NO: 187 - protein, 20 aa, Drosophila melanogaster
FDGRFVHSRSGEIIGKNSAV

SEQ ID NO: 188 - protein, 20 aa, Drosophila melanogaster
SSGLTMRHNNALAVSIETDV

SEQ ID NO: 189 - protein, 20 aa, Homo sapiens
NFGPSPTREGLIAGEKETHL

SEQ ID NO: 190 - protein, 20 aa, Drosophila melanogaster
EDDLVSHVDGSVISRREWYV

SEQ ID NO: 191 - protein, 20 aa, Homo sapiens
SSIQTMRAQMLHLHGTGIQV

SEQ ID NO: 192 - protein, 20 aa, Homo sapiens
ILNSIQVMRAQMNQIQSVEV

SEQ ID NO: 193 - protein, 20 aa, Homo sapiens
AENMVSQNDGSFISKKEWYV

SEQ ID NO: 194 - protein, 20 aa, Homo sapiens
SSPSDSYQGKGFVMSRAMYV

SEQ ID NO: 195 - protein, 20 aa, Homo sapiens
ILSSIQDMRLQMNQTLPVQV

SEQ ID NO: 196 - protein, 20 aa, Homo sapiens
YSQPSARSEGEFKQTSSFLV

SEQ ID NO: 197 - protein, 20 aa, Homo sapiens
AVRRRRQAMERPPALEDTEL

SEQ ID NO: 198 - protein, 20 aa, Homo sapiens
RALGKPRPPLPPPQLGDTFL

SEQ ID NO: 199 - protein, 20 aa, Homo sapiens
PYSELNYETSHYPASPDSWV

SEQ ID NO: 200 - protein, 20 aa, Homo sapiens
QPTPTLGLNLGNDPDRGTSI

SEQ ID NO: 201 - protein, 20 aa, Homo sapiens
DSDSSLDEPCRPGFASESKV

SEQ ID NO: 202 - protein, 20 aa, Homo sapiens
DSDPENEPFDEDQHTQITKV

SEQ ID NO: 203 - protein, 20 aa, Homo sapiens
PYQSQGFSTEEDEDEQVSAV

SEQ ID NO: 204 - protein, 20 aa, Homo sapiens
MNNDPNFTETIDESKKEWLI

SEQ ID NO: 205 - protein, 20 aa, Homo sapiens
LKSELNIQNAVNENQKEYFF

SEQ ID NO: 206 - protein, 20 aa, Homo sapiens
PKQANGGAYQKPTKQEEFYA

SEQ ID NO: 207 - protein, 20 aa, Homo sapiens
GERKPSSAAYQKAPTKEFYA

SEQ ID NO: 208 - protein, 20 aa, Homo sapiens
EPKQASVTYQKPDKQEEFYA

SEQ ID NO: 209 - protein, 20 aa, Homo sapiens
SYDLGKKPIYKKAPTNEFYA

SEQ ID NO: 210 - protein, 20 aa, Homo sapiens
TDEEREETEEEVYLLNSTTL

SEQ ID NO: 211 - protein, 20 aa, Homo sapiens
KKGTLEYLQLNTTDKESTYF

SEQ ID NO: 212 - protein, 20 aa, Homo sapiens
PRLKRMQQFEDLEDEIPQFV

SEQ ID NO: 213 - protein, 20 aa, Homo sapiens
ILSEEEQEMFRDFDYIADWC

SEQ ID NO: 214 - protein, 20 aa, Homo sapiens
CKACSAWRIQELSATVTTDC

SEQ ID NO: 215 - protein, 20 aa, Homo sapiens
PVYIVQEMPPQSPANIYYKV

SEQ ID NO: 216 - protein, 20 aa, Homo sapiens
KDITSDSENSNFRNEIQSLV

SEQ ID NO: 217 - protein, 20 aa, Homo sapiens
IQRADLVESLCSESTATSPV

SEQ ID NO: 218 - protein, 20 aa, Homo sapiens
LNSCSNRRVYKKMPSIESDV

SEQ ID NO: 219 - protein, 20 aa, Homo sapiens
EGSRVEMWNLMPPPAMERLI

SEQ ID NO: 220 - protein, 20 aa, Homo sapiens
SATESAESIEIYIPEAQTRL

SEQ ID NO: 221 - protein, 20 aa, Homo sapiens
SASERADSIEIYIPEAQTRL

SEQ ID NO: 222 - protein, 20 aa, Homo sapiens
ERMQASLPLDNISYRRESAI

SEQ ID NO: 223 - protein, 20 aa, Homo sapiens
FNGSSNGHVYEKLSSIESDV

SEQ ID NO: 224 - protein, 20 aa, Homo sapiens
PSSRASSRASSRPRPDDLEI

SEQ ID NO: 225 - protein, 20 aa, Homo sapiens
RNIEEVYVGGKQVVPFSSSV

SEQ ID NO: 226 - protein, 20 aa, Homo sapiens
EDPKDRPSAAHIVEALETDV

SEQ ID NO: 227 - protein, 20 aa, Homo sapiens
ENLELPVNPSSVVSERISSV

SEQ ID NO: 228 - protein, 20 aa, Homo sapiens
QEKDCDLVDLDDASLPVSDV

SEQ ID NO: 229 - protein, 20 aa, Homo sapiens
LKEKAFPFDLDDDSIRTSDV

SEQ ID NO: 230 - protein, 20 aa, Homo sapiens
INSVGSTASSSQPLLVHDDV

SEQ ID NO: 231 - protein, 20 aa, Homo sapiens
KPQIAALKEETEEEVQDTRL

SEQ ID NO: 232 - protein, 20 aa, Homo sapiens
SAHHRSQESLTSQESEDTYL

SEQ ID NO: 233 - protein, 20 aa, Homo sapiens
SRQDCCGNCSDSEEELPTRL

SEQ ID NO: 234 - protein, 20 aa, Homo sapiens
SEDMTLNILPEFKQNGDTSL

SEQ ID NO: 235 - protein, 20 aa, Homo sapiens
KENDYESISDLQQGRDITRL

SEQ ID NO: 236 - protein, 20 aa, Homo sapiens
DMESVLAATKLDKESFLTWL

SEQ ID NO: 237 - protein, 20 aa, Homo sapiens
VPSDNIDSQGRNCSTNDSLL

SEQ ID NO: 238 - protein, 20 aa, Homo sapiens
INTNGGLRNRVYEVPVETKF

SEQ ID NO: 239 - protein, 20 aa, Homo sapiens
RNTVQDPAYLRDIDGMNKPV

SEQ ID NO: 240 - protein, 20 aa, Homo sapiens
GSSGHLSGADSESQEENTQL

SEQ ID NO: 241 - protein, 20 aa, Homo sapiens
KEAAEAFLGFSYAPPTDSFL

SEQ ID NO: 242 - protein, 20 aa, Homo sapiens
PINAASSPQQRDRYSHWTKL

SEQ ID NO: 243 - protein, 20 aa, Homo sapiens
HMNGGRKNERALPLPQSSTC

SEQ ID NO: 244 - protein, 20 aa, Homo sapiens
QLGYRLQQIAAAVENKVTDL

SEQ ID NO: 245 - protein, 20 aa, Homo sapiens
QLAFRLQQIAAALENKVTDL

SEQ ID NO: 246 - protein, 20 aa, Homo sapiens
QLACRLQQVAALVENKVTDL

SEQ ID NO: 247 - protein, 20 aa, Homo sapiens
SGDGLYEGLDWLSNQLRNQK

SEQ ID NO: 248 - protein, 20 aa, Homo sapiens
SGDGLYEGLDWLANQLKNKK

SEQ ID NO: 249 - protein, 20 aa, Homo sapiens
RELVDRGEVRQFTLRHWLKV

SEQ ID NO: 250 - protein, 20 aa, Homo sapiens
TFKGTPTAENPEYLGLDVPV

SEQ ID NO: 251 - protein, 20 aa, Homo sapiens
HHLVAQRDIRQFQLQHWLAI

SEQ ID NO: 252 - protein, 20 aa, Homo sapiens
WPPAPPPGQTVRPGVKESLV

SEQ ID NO: 253 - protein, 20 aa, Homo sapiens
HSEDLADFPPSPDRDRESIV

SEQ ID NO: 254 - protein, 20 aa, Homo sapiens
VDVAVLTSFLQDEKVKESYV

SEQ ID NO: 255 - protein, 20 aa, Homo sapiens
SLKPGTVLPPPPYRHRNTVV

SEQ ID NO: 256 - protein, 20 aa, Homo sapiens
YLENRQHYQMIQREDQETAV

SEQ ID NO: 257 - protein, 20 aa, Homo sapiens
LQGDPALQDAGDSSRKEYFI

SEQ ID NO: 258 - protein, 20 aa, Homo sapiens
KAASFKLQRQNRVDSKETEC

SEQ ID NO: 259 - protein, 20 aa, Human papillomavirus type 18
HSCCNRARQERLQRRRETQV

SEQ ID NO: 260 - protein, 20 aa, Mus musculus
IDRGEEKKGRDSSGEVLSSV

SEQ ID NO: 261 - protein, 20 aa, Mus musculus
AENMVSQNDGSFISKKEWYV

SEQ ID NO: 262 - protein, 20 aa, Mus musculus
EDGLVSHVDGSVISRREWYV

SEQ ID NO: 263 - protein, 20 aa, Mus musculus
YSQPSARSEGEFKQTSSFLV

SEQ ID NO: 264 - protein, 20 aa, Mus musculus
CAVTKTLSASHRTCYLVTRL

SEQ ID NO: 265 - protein, 20 aa, Mus musculus
FNGSSNGHVYEKLSSIESDV

SEQ ID NO: 266 - protein, 20 aa, Mus musculus
TQGFPRSCTWRRISSLESEV

SEQ ID NO: 267 - protein, 20 aa, Mus musculus
SLREQAEKEGSALSVRISNV

SEQ ID NO: 268 - protein, 20 aa, Mus musculus
RQEDQRERELRSLLLQQSNV

SEQ ID NO: 269 - protein, 20 aa, Mus musculus
VPGALDYTAFSSALYGESDL

SEQ ID NO: 270 - protein, 20 aa, Mus musculus
EFVDPKSHKFVMRLQSETSV

SEQ ID NO: 271 - protein, 20 aa, Mus musculus
MKYKAISEELDNALNDITSL

SEQ ID NO: 272 - protein, 20 aa, Mus musculus
TFEGTPTAENPEYLGLDVPV

SEQ ID NO: 273 - protein, 20 aa, Mus musculus
SQSDKTPEELFHPLGADSQV

SEQ ID NO: 274 - protein, 20 aa, Mus musculus
PRMRRQFSAPNLKAGRETTV

SEQ ID NO: 275 - protein, 20 aa, Mus musculus
RRKLQQRQPLPDSNPEESSV

SEQ ID NO: 276 - protein, 20 aa, Mus musculus
SAAHSIGSTQSTPCSSSSTA

SEQ ID NO: 277 - protein, 20 aa, Mus musculus
NSWRKFYTRLTNSKQGETTV

SEQ ID NO: 278 - protein, 20 aa, Mus musculus
LMDGLPPGDSNQLAWFDTDL

SEQ ID NO: 279 - protein, 20 aa, Mus musculus
GLRRARDKAQSGGKKKETLV

SEQ ID NO: 280 - protein, 20 aa, Mus musculus
SYPTPRPYPKPTPSSGKDYV

SEQ ID NO: 281 - protein, 20 aa, Mus musculus
KAGATIPLVGQDIIDLQTEV

SEQ ID NO: 282 - protein, 20 aa, Mus musculus
PPSSEELEGENPGKEFDTPL

SEQ ID NO: 283 - protein, 20 aa, Mus musculus
DYDLSPTDTAAHEDYVTTRL

SEQ ID NO: 284 - protein, 20 aa, Mus musculus
CDLLMHKWGDGQEEQVTTRL

SEQ ID NO: 285 - protein, 20 aa, Mus musculus
PPATPSPRLALPAHHNATRL

SEQ ID NO: 286 - protein, 20 aa, Mus musculus
PLFNDVESVLNKSEPFLTWL

SEQ ID NO: 287 - protein, 20 aa, Mus musculus
LGRGRSEEALADSRSYVSNL

SEQ ID NO: 288 - protein, 20 aa, Mus musculus
PVYIVQEMPPQSPANIYYKV

SEQ ID NO: 289 - protein, 20 aa, Mus musculus
RTQITALKEETEEEVQETRL

SEQ ID NO: 290 - protein, 20 aa, Mus musculus
FEGFSYVNPQFVHPILQSAV

SEQ ID NO: 291 - protein, 20 aa, Mus musculus
KREKRGNGWVKPGKGNETVV

SEQ ID NO: 292 - protein, 20 aa, Mus musculus
QSWRRFYHRLSHSSKGETAV

SEQ ID NO: 293 - protein, 20 aa, Mus musculus
HSWRKFYTRLTNSRHGETTV

SEQ ID NO: 294 - protein, 20 aa, Mus musculus
PTLAPAKFKYAYKTDGITVV

SEQ ID NO: 295 - protein, 20 aa, Mus musculus
SRMGAVPVMIPAQSKDGSIV

SEQ ID NO: 296 - protein, 20 aa, Mus musculus
PSPGQTVKPEADRDHTSDQL

SEQ ID NO: 297 - protein, 20 aa, Mus musculus
GPDGLIKVNDFTQNPRVRLE

SEQ ID NO: 298 - protein, 20 aa, Oryctolagus cuniculus
IVPLDNLTKDDLDEEEDTHL

SEQ ID NO: 299 - protein, 20 aa, Rattus norvegicus
QNNTLPHPHPHPHSHSTTRV

SEQ ID NO: 300 - protein, 20 aa, Rattus norvegicus
QNFATYKEGYNVYGIESVKI

SEQ ID NO: 301 - protein, 20 aa, Rattus norvegicus
QNYATYREGYNVYGTESVKI

SEQ ID NO: 302 - protein, 20 aa, Rattus norvegicus
IVTVVTMVTNVDFPPKESSL

SEQ ID NO: 303 - protein, 20 aa, Rattus norvegicus
PSSAKSANKNKKNKDKEYYV

SEQ ID NO: 304 - protein, 20 aa, Rattus norvegicus
CWNCGCEWNRACMGDHWFDV

SEQ ID NO: 305 - protein, 20 aa, Rattus norvegicus
EVDVITSSLTHTHSYIETHV

SEQ ID NO: 306 - protein, 20 aa, Rattus norvegicus
PYSELNYETSHYPASPDSWV

SEQ ID NO: 307 - protein, 20 aa, Rattus norvegicus
LTSPTYRSLLLQGAPQSSEA

SEQ ID NO: 308 - protein, 20 aa, Rattus norvegicus
VDGVKLKKDKLNPQSNYSEA

SEQ ID NO: 309 - protein, 20 aa, Rattus norvegicus
PKQANGGAYQKPTKQEEFYA

SEQ ID NO: 310 - protein, 20 aa, Rattus norvegicus
DVASSRLQRLDNSTVRTYSC

SEQ ID NO: 311 - protein, 20 aa, Rattus norvegicus
AKEGRPSFVGSSSANTSTTL

SEQ ID NO: 312 - protein, 20 aa, Rattus norvegicus
LNETTETQRTLLNGDLQTSI

SEQ ID NO: 313 - protein, 20 aa, Rattus norvegicus
KLVRKVLKNMNDPAWDETNL

SEQ ID NO: 314 - protein, 20 aa, Rattus norvegicus
PSLEGPGPDGDGQMQLVTSL

SEQ ID NO: 315 - protein, 20 aa, Rattus norvegicus
EGCIPEGDVREGQMQLVTSL

SEQ ID NO: 316 - protein, 20 aa, Rattus norvegicus
SSPKYDTLIIRDYTQSSSSL

SEQ ID NO: 317 - protein, 20 aa, Rattus norvegicus
SATESAESIEIYIPEAQTRL

SEQ ID NO: 318 - protein, 20 aa, Rattus norvegicus
SATERADSIEIYIPEAQTRL

SEQ ID NO: 319 - protein, 20 aa, Rattus norvegicus
PGGRQAPKGQHVWQRLSVHV

SEQ ID NO: 320 - protein, 20 aa, Rattus norvegicus
TASPRHRHVPPSFRVMVSGL

SEQ ID NO: 321 - protein, 20 aa, Rattus norvegicus
SATESADSIEIYIPEAQTRL

SEQ ID NO: 322 - protein, 20 aa, Rattus norvegicus
SQHSNHRPSPDQDDEEGIWA

SEQ ID NO: 323 - protein, 20 aa, Rattus norvegicus
SNQTNHKPSPDQDEEEGIWA

SEQ ID NO: 324 - protein, 20 aa, Rattus norvegicus
SLKPGTMLPPPPYRHRNTVV

SEQ ID NO: 325 - protein, 20 aa, Rattus norvegicus
LNSCSNRRVYKKMPSIESDV

SEQ ID NO: 326 - protein, 20 aa, Rattus norvegicus
FNGSSNGHVYEKLSSIESDV

SEQ ID NO: 327 - protein, 20 aa, Rattus norvegicus
FEGFSYVNPQFVHPILQSAV

SEQ ID NO: 328 - protein, 20 aa, Rattus norvegicus
KRLLDAQRGSFPPWVQQTRV

SEQ ID NO: 329 - protein, 20 aa, Rattus norvegicus
NSWRKFYTRLTNSKQGETTV

SEQ ID NO: 330 - protein, 20 aa, Rattus norvegicus
KREKRGNGWVKPGKGNETVV

SEQ ID NO: 331 - protein, 20 aa, Rattus norvegicus
KAASFKLQRQSRVDSKETEC

SEQ ID NO: 332 - protein, 20 aa, Rattus norvegicus
DRLQASSGALERPYRRESEI

SEQ ID NO: 333 - protein, 20 aa, Rattus norvegicus
ELLQFCRTPNPALRNGQYWV

SEQ ID NO: 334 - protein, 20 aa, Rattus norvegicus
YKKQAFPMISKRPEHLRMNL

SEQ ID NO: 335 - protein, 20 aa, Rattus norvegicus
SHTVNVPLQTALGTLEEIAC

SEQ ID NO: 336 - protein, 20 aa, Rattus norvegicus
YAANILPHHPARGTFEDFTC

SEQ ID NO: 337 - protein, 20 aa, Rattus norvegicus
QNFATYKEGYNVYGIESVKI

SEQ ID NO: 338 - protein, 20 aa, Rattus norvegicus
LSWPRKIVPHGQNMTVSVVI

SEQ ID NO: 339 - protein, 20 aa, Rattus norvegicus
TYVPTVCNGREVLDSTTSSL

SEQ ID NO: 340 - protein, 20 aa, Rattus norvegicus
VDPNSPAAKKKYVSYNNLVI

SEQ ID NO: 341 - protein, 20 aa, Rattus norvegicus
QPTPTLGLNLGNDPDRGTSI

SEQ ID NO: 342 - protein, 20 aa, Rattus norvegicus
DDSETDKNNCSNAKAVETDV

SEQ ID NO: 343 - protein, 20 aa, Rattus norvegicus
ICAMCGKKVLDTKNYKQTSV

SEQ ID NO: 344 - protein, 20 aa, Rattus norvegicus
EVINMHTFNDRRLPGKETMA

SEQ ID NO: 345 - protein, 20 aa, Rattus norvegicus
SRIKKVSYNIGTMFLRETSL

SEQ ID NO: 346 - protein, 20 aa, Rattus norvegicus
IICEQAAIKQATKDKKITTV

SEQ ID NO: 347 - protein, 20 aa, Rattus norvegicus
LSTGVRARHSYHHPDQDHWC

SEQ ID NO: 348 - protein, 20 aa, Rattus norvegicus
ATDYLVQPFMDQLAFHQFYI

SEQ ID NO: 349 - protein, 20 aa, Rattus norvegicus
STDNLVRPFMDTLASHQLYI

SEQ ID NO: 350 - protein, 20 aa, Rattus norvegicus
LLNVLQRQELGDSLDDEIAV

SEQ ID NO: 351 - protein, 20 aa, Rattus norvegicus
TSDHAHLEHISRKRSGEAAV

SEQ ID NO: 352 - protein, 20 aa, Synechocystis PCC6803
LDLASGEQAPVALTAPAVNG

SEQ ID NO: 353 - protein, 20 aa, Xenopus laevis
HMNGGRKNERALPLPQSSAC

SEQ ID NO: 354 - protein, 20 aa, Xenopus laevis
NSWRKFYTRLTNSKQGETTV

SEQ ID NO: 355 - protein, 10 aa, Homo sapiens
ISSSFFDTWV

SEQ ID NO: 356 - protein, 10 aa, Homo sapiens
RHFIFFDTWV

SEQ ID NO: 357 - protein, 10 aa, Homo sapiens
ITHLFFDTWV

SEQ ID NO: 358 - protein, 10 aa, Homo sapiens
RTSRWFDTWV

SEQ ID NO: 359 - protein, 10 aa, Homo sapiens
NLGRYFDTWV

SEQ ID NO: 360 - protein, 10 aa, Homo sapiens
FPHPYFDTWV

SEQ ID NO: 361 - protein, 10 aa, Homo sapiens
SSYFPFDTWV

SEQ ID NO: 362 - protein, 10 aa, Homo sapiens
SNRRHFDTWV

SEQ ID NO: 363 - protein, 10 aa, Homo sapiens
SNLCHFDTWV

SEQ ID NO: 364 - protein, 10 aa, Homo sapiens
TKFHLFDTWV

SEQ ID NO: 365 - protein, 10 aa, Homo sapiens
GVHSVFDTWV

SEQ ID NO: 366 - protein, 10 aa, Homo sapiens
LPSRVFDTWV

SEQ ID NO: 367 - protein, 10 aa, Homo sapiens
CRPGSFDTWV

SEQ ID NO: 368 - protein, 10 aa, Homo sapiens
KLRTGFDTWV

SEQ ID NO: 369 - protein, 10 aa, Homo sapiens
LFLFFWDTWV

SEQ ID NO: 370 - protein, 10 aa, Homo sapiens
ISSSFFDTWV

SEQ ID NO: 371 - protein, 10 aa, Homo sapiens
MPNSFWDTWV

SEQ ID NO: 372 - protein, 10 aa, Homo sapiens
IPPMYWDTWV

SEQ ID NO: 373 - protein, 10 aa, Homo sapiens
GSYFRWDTWV

SEQ ID NO: 374 - protein, 10 aa, Homo sapiens
SSFFRWDTWV

SEQ ID NO: 375 - protein, 10 aa, Homo sapiens
LVRTSWDTWV

SEQ ID NO: 376 - protein, 10 aa, Homo sapiens
LSFHCWDTWV

SEQ ID NO: 377 - protein, 10 aa, Homo sapiens
SASHFYDTWV

SEQ ID NO: 378 - protein, 10 aa, Homo sapiens
FGSRDYDTWV

SEQ ID NO: 379 - protein, 10 aa, Homo sapiens
RFDRSYDTWV

SEQ ID NO: 380 - protein, 10 aa, Homo sapiens
LITLFLDTWV

SEQ ID NO: 381 - protein, 10 aa, Homo sapiens
RCCFFLDTWV

SEQ ID NO: 382 - protein, 10 aa, Homo sapiens
SVTHFLDTWV

SEQ ID NO: 383 - protein, 10 aa, Homo sapiens
TSFLTLDTWV

SEQ ID NO: 384 - protein, 10 aa, Homo sapiens
LFAVFNDTWV

SEQ ID NO: 385 - protein, 10 aa, Homo sapiens
SLPHYNDTWV

SEQ ID NO: 386 - protein, 10 aa, Homo sapiens
WCSGRNDTWV

SEQ ID NO: 387 - protein, 10 aa, Homo sapiens
LLTQYDDTWV

SEQ ID NO: 388 - protein, 10 aa, Homo sapiens
NLYMWDDTWV

SEQ ID NO: 389 - protein, 10 aa, Homo sapiens
SSFFRWDTWV

SEQ ID NO: 390 - protein, 10 aa, Homo sapiens
HPLTDSDTWV

SEQ ID NO: 391 - protein, 10 aa, Homo sapiens
SSANGSDTWV

SEQ ID NO: 392 - protein, 10 aa, Homo sapiens
LYGGFSDTWV

SEQ ID NO: 393 - protein, 10 aa, Homo sapiens
LLRLWMDTWV

SEQ ID NO: 394 - protein, 10 aa, Homo sapiens
FVGSYADTWV

SEQ ID NO: 395 - protein, 10 aa, Homo sapiens
FLNRYRDTWV

SEQ ID NO: 396 - protein, 10 aa, Homo sapiens
CSPSSIDTWV

SEQ ID NO: 397 - protein, 10 aa, Homo sapiens
SKGFWTDTWV

SEQ ID NO: 398 - protein, 10 aa, Homo sapiens
SFGAFVDTWV

SEQ ID NO: 399 - protein, 10 aa, Homo sapiens
  misc_feature (1)..(5): Xaa can be any naturally occurring amino acid
XXXXXPDTWV

SEQ ID NO: 400 - protein, 10 aa, Homo sapiens
HKPHFFETWV

SEQ ID NO: 401 - protein, 10 aa, Homo sapiens
HASSFFETWV

SEQ ID NO: 402 - protein, 10 aa, Homo sapiens
QLHSWFETWV

SEQ ID NO: 403 - protein, 10 aa, Homo sapiens
HSSSYFETWV

SEQ ID NO: 404 - protein, 10 aa, Homo sapiens
GSPPIFETWV

SEQ ID NO: 405 - protein, 10 aa, Homo sapiens
FTRSIFETWV

SEQ ID NO: 406 - protein, 10 aa, Homo sapiens
SFAKWFQTWV

SEQ ID NO: 407 - protein, 10 aa, Homo sapiens
PVIWLFHTWV

SEQ ID NO: 408 - protein, 10 aa, Homo sapiens
LLRLWMDTWV

SEQ ID NO: 409 - protein, 10 aa, Homo sapiens
RLDRFLATWV

SEQ ID NO: 410 - protein, 10 aa, Homo sapiens
FCRRWFDSWV

SEQ ID NO: 411 - protein, 10 aa, Homo sapiens
VTPSFFDSWV

SEQ ID NO: 412 - protein, 10 aa, Homo sapiens
KFPTFFDSWV

SEQ ID NO: 413 - protein, 10 aa, Homo sapiens
PRSSFFDSWV

SEQ ID NO: 414 - protein, 10 aa, Homo sapiens
SSQKFFDSWV

SEQ ID NO: 415 - protein, 10 aa, Homo sapiens
RSPTFFDSWV

SEQ ID NO: 416 - protein, 10 aa, Homo sapiens
  misc_feature (1)..(4): Xaa can be any naturally occurring amino acid
XXXXFFDSWV

SEQ ID NO: 417 - protein, 10 aa, Homo sapiens
GGHSWFDSWV

SEQ ID NO: 418 - protein, 10 aa, Homo sapiens
SSGSWFDSWV

SEQ ID NO: 419 - protein, 10 aa, Homo sapiens
RSWNYFDSWV

SEQ ID NO: 420 - protein, 10 aa, Homo sapiens
VRYSLFDSWV

SEQ ID NO: 421 - protein, 10 aa, Homo sapiens
SRFLNFDSWV

SEQ ID NO: 422 - protein, 10 aa, Homo sapiens
RMSSRWDSWV

SEQ ID NO: 423 - protein, 10 aa, Homo sapiens
FSHSRWDSWV

SEQ ID NO: 424 - protein, 10 aa, Homo sapiens
SRFWPWDSWV

SEQ ID NO: 425 - protein, 10 aa, Homo sapiens
VSQFWRDSWV

SEQ ID NO: 426 - protein, 10 aa, Homo sapiens
LPFPFHDSWV

SEQ ID NO: 427 - protein, 10 aa, Homo sapiens
KFPTFFDSWV

SEQ ID NO: 428 - protein, 10 aa, Homo sapiens
SHTCWHDSWV

SEQ ID NO: 429 - protein, 10 aa, Homo sapiens
LCKAWFESWV

SEQ ID NO: 430 - protein, 10 aa, Homo sapiens
NDRMWFDDWV

SEQ ID NO: 431 - protein, 10 aa, Homo sapiens
WHLSWFDDWV

SEQ ID NO: 432 - protein, 10 aa, Homo sapiens
NWLSWYDDWV

SEQ ID NO: 433 - protein, 10 aa, Homo sapiens
SCNYFYDEWV

SEQ ID NO: 434 - protein, 10 aa, Homo sapiens
RSKCFLDEWV

SEQ ID NO: 435 - protein, 10 aa, Homo sapiens
LGSGWWDTFV

SEQ ID NO: 436 - protein, 10 aa, Homo sapiens
NSFCWWDTFV

SEQ ID NO: 437 - protein, 10 aa, Homo sapiens
SSDSWYDTFV

SEQ ID NO: 438 - protein, 10 aa, Homo sapiens
SNGRWYDTFV

SEQ ID NO: 439 - protein, 10 aa, Homo sapiens
MFSKFFDTWL

SEQ ID NO: 440 - protein, 10 aa, Homo sapiens
QVSRFFETWL

SEQ ID NO: 441 - protein, 10 aa, Homo sapiens
SPTSFFETWL

SEQ ID NO: 442 - protein, 10 aa, Homo sapiens
STPFWFETWL

SEQ ID NO: 443 - protein, 10 aa, Homo sapiens
LFGSFLETWL

SEQ ID NO: 444 - protein, 10 aa, Homo sapiens
LFSPWLETWL

SEQ ID NO: 445 - protein, 10 aa, Homo sapiens
RSVSWIETWL

SEQ ID NO: 446 - protein, 10 aa, Homo sapiens
WHLSWFDDWV

SEQ ID NO: 447 - protein, 10 aa, Homo sapiens
YLQRFLETHL

SEQ ID NO: 448 - protein, 10 aa, Homo sapiens
VMRYFLETHL

SEQ ID NO: 449 - protein, 10 aa, Homo sapiens
SLRGFLETHL

SEQ ID NO: 450 - protein, 10 aa, Homo sapiens
RTISFLETHL

SEQ ID NO: 451 - protein, 10 aa, Homo sapiens
RSVSFLETHL

SEQ ID NO: 452 - protein, 10 aa, Homo sapiens
RKSFFLETHL

SEQ ID NO: 453 - protein, 10 aa, Homo sapiens
AISYFLETHL

SEQ ID NO: 454 - protein, 10 aa, Homo sapiens
LLRVFLETHL

SEQ ID NO: 455 - protein, 10 aa, Homo sapiens
LFRVFLETHL

SEQ ID NO: 456 - protein, 10 aa, Homo sapiens
CLSSWLETHL

SEQ ID NO: 457 - protein, 10 aa, Homo sapiens
ARDNWLETHL

SEQ ID NO: 458 - protein, 10 aa, Homo sapiens
SLIRYLETHL

SEQ ID NO: 459 - protein, 10 aa, Homo sapiens
RFLGLLETHL

SEQ ID NO: 460 - protein, 10 aa, Homo sapiens
TFRSFFETHL

SEQ ID NO: 461 - protein, 10 aa, Homo sapiens
FVSIFFETHL

SEQ ID NO: 462 - protein, 10 aa, Homo sapiens
FLKRFFETHL

SEQ ID NO: 463 - protein, 10 aa, Homo sapiens
SLTRFFETHL

SEQ ID NO: 464 - protein, 10 aa, Homo sapiens
RGQSFFETHL

SEQ ID NO: 465 - protein, 10 aa, Homo sapiens
NSRSYFETHL

SEQ ID NO: 466 - protein, 10 aa, Homo sapiens
SIRVWRETHL

SEQ ID NO: 467 - protein, 10 aa, Homo sapiens
LHMLWRETHL

SEQ ID NO: 468 - protein, 10 aa, Homo sapiens
  misc_feature (1)..(1): Xaa can be any naturally occurring amino acid
XASVYRETHL

SEQ ID NO: 469 - protein, 10 aa, Homo sapiens
LLRCWKETHL

SEQ ID NO: 470 - protein, 10 aa, Homo sapiens
HSSVWMETHL

SEQ ID NO: 471 - protein, 10 aa, Homo sapiens
MNRFFNETHL

SEQ ID NO: 472 - protein, 10 aa, Homo sapiens
SLRRFLETDL

SEQ ID NO: 473 - protein, 10 aa, Homo sapiens
TPRGFLETDL

SEQ ID NO: 474 - protein, 10 aa, Homo sapiens
SRRSFLETDL

SEQ ID NO: 475 - protein, 10 aa, Homo sapiens
RRVDFLETDL

SEQ ID NO: 476 - protein, 10 aa, Homo sapiens
RLSRFLETDL

SEQ ID NO: 477 - protein, 10 aa, Homo sapiens
RAAGFLETDL

SEQ ID NO: 478 - protein, 10 aa, Homo sapiens
RCFGFLETDL

SEQ ID NO: 479 - protein, 10 aa, Homo sapiens
KFLRFLETDL

SEQ ID NO: 480 - protein, 10 aa, Homo sapiens
YVRWYLETDL

SEQ ID NO: 481 - protein, 10 aa, Homo sapiens
RVSSYLETDL

SEQ ID NO: 482 - protein, 10 aa, Homo sapiens
NRFPYLETDL

SEQ ID NO: 483 - protein, 10 aa, Homo sapiens
SSRRFFETDL

SEQ ID NO: 484 - protein, 10 aa, Homo sapiens
NRPRFFETDL

SEQ ID NO: 485 - protein, 10 aa, Homo sapiens
SKSCYFETDL

SEQ ID NO: 486 - protein, 10 aa, Homo sapiens
NVHRFYETDL

SEQ ID NO: 487 - protein, 10 aa, Homo sapiens
FSSIWRETDL

SEQ ID NO: 488 - protein, 10 aa, Homo sapiens
MHRIWHETDL

SEQ ID NO: 489 - protein, 10 aa, Homo sapiens
RSLPYHETDL

SEQ ID NO: 490 - protein, 10 aa, Homo sapiens
RWRPWNETDL

SEQ ID NO: 491 - protein, 10 aa, Homo sapiens
RGTFWSETDL

SEQ ID NO: 492 - protein, 10 aa, Homo sapiens
RRLGFCETDL

SEQ ID NO: 493 - protein, 10 aa, Homo sapiens
RHAHYLETWL

SEQ ID NO: 494 - protein, 10 aa, Homo sapiens
RHTTYFETWL

SEQ ID NO: 495 - protein, 10 aa, Homo sapiens
FSHYREGDWL

SEQ ID NO: 496 - protein, 10 aa, Homo sapiens
TSHYSEGDWL

SEQ ID NO: 497 - protein, 10 aa, Homo sapiens
RASYKQGDWL

SEQ ID NO: 498 - protein, 10 aa, Homo sapiens
RSSYRVGDWL

SEQ ID NO: 499 - protein, 10 aa, Homo sapiens
RASYKPGDWL

SEQ ID NO: 500 - protein, 10 aa, Homo sapiens
LLRRYLETSL

SEQ ID NO: 501 - protein, 10 aa, Homo sapiens
ILSRFFETSL

SEQ ID NO: 502 - protein, 10 aa, Homo sapiens
RFLRFFETSL

SEQ ID NO: 503 - protein, 10 aa, Homo sapiens
IRRAYFETSL

SEQ ID NO: 504 - protein, 10 aa, Homo sapiens
LGRAWRETSL

SEQ ID NO: 505 - protein, 10 aa, Homo sapiens
LARLWRETSL

SEQ ID NO: 506 - protein, 10 aa, Homo sapiens
SSGCYRETSL

SEQ ID NO: 507 - protein, 10 aa, Homo sapiens
RCAGYCETSL

SEQ ID NO: 508 - protein, 10 aa, Homo sapiens
RRLPWFETRL

SEQ ID NO: 509 - protein, 10 aa, Homo sapiens
VHLLWRETRL

SEQ ID NO: 510 - protein, 10 aa, Homo sapiens
TSKVWRETRL

SEQ ID NO: 511 - protein, 10 aa, Homo sapiens
IRRRWSETFL

SEQ ID NO: 512 - protein, 10 aa, Homo sapiens
LFRRFLETNL

SEQ ID NO: 513 - protein, 10 aa, Homo sapiens
ASRIWRETDI

SEQ ID NO: 514 - protein, 10 aa, Homo sapiens
RASYREGDWI

SEQ ID NO: 515 - protein, 10 aa, Homo sapiens
LLRIWRETSI

SEQ ID NO: 516 - protein, 10 aa, Homo sapiens
IRRIWRETSM

SEQ ID NO: 517 - protein, 10 aa, Homo sapiens
LLRVFRETSM

SEQ ID NO: 518 - protein, 10 aa, Homo sapiens
LWLGWKTWIL

SEQ ID NO: 519 - protein, 10 aa, Homo sapiens
  misc_feature (1)..(2): Xaa can be any naturally occurring amino acid
XXEKSKIWFV

SEQ ID NO: 520 - protein, 10 aa, Homo sapiens
RWKDIETWLL

SEQ ID NO: 521 - protein, 10 aa, Homo sapiens
KSEDSRIWWV

SEQ ID NO: 522 - protein, 10 aa, Homo sapiens
QDVPGKIWFV

SEQ ID NO: 523 - protein, 10 aa, Homo sapiens
LCRVYECFWL

SEQ ID NO: 524 - protein, 10 aa, Homo sapiens
NSRLWDRDVF

SEQ ID NO: 525 - protein, 10 aa, Homo sapiens
KMLWDKIWHV

SEQ ID NO: 526 - protein, 10 aa, Homo sapiens
LCHIFKCFLV

SEQ ID NO: 527 - protein, 10 aa, Homo sapiens
LCRRFFCFYL

SEQ ID NO: 528 - protein, 10 aa, Homo sapiens
RDTIWEIFHF

SEQ ID NO: 529 - protein, 10 aa, Homo sapiens
RGGIDRIWWV

SEQ ID NO: 530 - protein, 10 aa, Homo sapiens
  misc_feature (1)..(5): Xaa can be any naturally occurring amino acid
XXXXXKVGGF

SEQ ID NO: 531 - protein, 10 aa, Homo sapiens
LGDIDKSCRV

SEQ ID NO: 532 - protein, 10 aa, Homo sapiens
LPRIWEIWTL

SEQ ID NO: 533 - protein, 10 aa, Homo sapiens
FRLWDVIWLV

SEQ ID NO: 534 - protein, 5 aa, Artificial Sequence
  Synthetic peptide
  MISC_FEATURE (3)..(3): Xaa is Phe, Trp or Tyr
  misc_feature (4)..(4): Xaa can be any naturally occurring amino acid
FDXXC

SEQ ID NO: 535 - DNA, 41 bp, Artificial Sequence
  Synthetic primer
ctaggatcagcgggtttagacttaactgaaaattacattgc

SEQ ID NO: 536 - DNA, 42 bp, Artificial Sequence
  Synthetic primer
gccctctaggatcagcgggaattcttaactgaaaattacatt

SEQ ID NO: 537 - DNA, 51 bp, Artificial Sequence
  Synthetic primer
caatattttctgttattgctagcgttttagcacaggctgtgctgactcagc

SEQ ID NO: 538 - DNA, 42 bp, Artificial Sequence
  Synthetic primer
agtcgattttgttacatcctatgaacattctgtaggggccac

SEQ ID NO: 539 - DNA, 25 bp, Artificial Sequence
  Synthetic primer
gatgtaacaaaatcgactttgttcc

SEQ ID NO: 540 - DNA, 41 bp, Artificial Sequence
  Synthetic primer
gactgcaccagctggacctgtgctaaaacgctggcaataac

SEQ ID NO: 541 - DNA, 20 bp, Artificial Sequence
  Synthetic primer
caggtccagctggtgcagtc

SEQ ID NO: 542 - DNA, 42 bp, Artificial Sequence
  Synthetic primer
tcagatcagcgggtttaaactcaggcgcagaactcggtcttg

SEQ ID NO: 543 - DNA, 39 bp, Artificial Sequence
  Synthetic primer
cttaactgtgccctccatcgaaaaatcagtcaagatatc

SEQ ID NO: 544 - DNA, 39 bp, Artificial Sequence
  Synthetic primer
gatatcttgactgatttttcgatggagggcacagttaag

SEQ ID NO: 545 - DNA, 20 bp, Artificial Sequence
  Synthetic primer
caagccatggctcaggtcca

SEQ ID NO: 546 - DNA, 72 bp, Artificial Sequence
  Synthetic primer
gggtttaaactcaggcgcagaactcggtcttgcctgaaccgccgcctccacaagatttgggctcaactctct

SEQ ID NO: 547 - protein, 1630 aa, Homo sapiens
MLKCIPLWRCNRHVESVDKRHCSLQAVPEEIYRYSRSLEELLLDANQLRELPKPFFRLLNLRKLGLSDNEIQRLPPEVANFMQLVELDVSRNDIPEIPESIKFCKALEIADFSGNPLSRLPDGFTQLRSLAHLALNDVSLQALPGDVGNLANLVTLELRENLLKSLPASLSFLVKLEQLDLGGNDLEVLPDTLGALPNLRELWLDRNQLSALPPELGNLRRLVCLDVSENRLEELPAELGGLVLLTDLLLSQNLLRRLPDGIGQLKQLSILKVDQNRLCEVTEAIGDCENLSELILTENLLMALPRSLGKLTKLTNLNVDRNHLEALPPEIGGCVALSVLSLRDNRLAVLPPELAHTTELHVLDVAGNRLQSLPFALTHLNLKALWLAENQAQPMLRFQTEDDARTGEKVLTCYLLPQQPPLSLEDAGQQGSLSETWSDAPPSRVSVIQFLEAPIGDEDAEEAAAEKRGLQRRATPHPSELKVMKRSIEGRRSEACPCQPDSGSPLPAEEEKRLSAESGLSEDSRPSASTVSEAEPEGPSAEAQGGSQQEATTAGGEEDAEEDYQEPTVHFAEDALLPGDDREIEEGQPEAPWTLPGGRQRLIRKDTPHYKKHFKISKLPQPEAVVALLQGMQPDGEGPVAPGGWHNGPHAPWAPRAQKEEEEEEEGSPQEEEEEEEEENRAEEEEASTEEEDKEGAVVSAPSVKGVSFDQANNLLIEPARIEEEELTLTILRQTGGLGISIAGGKGSTPYKGDDEGIFISRVSEEGPAARAGVRVGDKLLEVNGVALQGAEHHEAVEALRGAGTAVQMRVWRERMVEPENAVTITPLRPEDDYSPRERRGGGLRLPLLPPESPGPLRQRHVACLARSERGLGFSIAGGKGSTPYRAGDAGIFVSRIAEGGAAHRAGTLQVGDRVLSINGVDVTEARHDHAVSLLTAASPTIALLLEREAGGPLPPSPLPHSSPPTAAVATTSITTATPGVPGLPSLAPSLLAAALEGPYPVEEIRLPRAGGPLGLSIVGGSDHSSHPFGVQEPGVFISKVLPRGLAARSGLRVGDRILAVNGQDVRDATHQEAVSALLRPCLELSLLVRRDPAPPGLRELCIQKAPGERLGISIRGGARGHAGNPRDPTDEGIFISKVSPTGAAGRDGRLRVGLRLLEVNQQSLLGLTHGEAVQLLRSVGDTLTVLVCDGFEASTDAALEVSPGVIANPFAAGIGHRNSLESISSIDRELSPEGPGKEKELPGQTLHWGPEATEAAGRGLQPLKLDYRALAAVPSAGSVQRVPSGAAGGKMAESPCSPSGQQPPSPPSPDELPANVKQAYRAFAAVPTSHPPEDAPAQPPTPGPAASPEQLSFRERQKYFELEVRVPQAEGPPKRVSLVGADDLRKMQEEEARKLQQKRAQMLREAAEAGAEARLALDGETLGEEEQEDEQPPWASPSPTSRQSPASPPPLGGGAPVRTAKAERRHQERLRVQSPEPPAPERALSPAELRALEAEKRALWRAARMKSLEQDALRAQMVLSRSQEGRGTRGPLERLAEAPSPAPTPSPTPVEDLGPQTSTSPGRLSPDFAEELRSLEPSPSPGPQEEDGEVALVLLGRPSPGAVGPEDVALCSSRRPVRPGRRGLGPVPS

SEQ ID NO: 548 - protein, 480 aa, Homo sapiens
MQIPRAALLPLLLLLLAAPASAQLSRAGRSAPLAAGCPDRCEPARCPPQPEHCEGGRARDACGCCEVCGAPEGAACGLQEGPCGEGLQCVVPFGVPASATVRRRAQAGLCVCASSEPVCGSDANTYANLCQLRAASRRSERLHRPPVIVLQRGACGQGQEDPNSLRHKYNFIADVVEKIAPAVVHIELFRKLPFSKREVPVASGSGFIVSEDGLIVTNAHVVTNKHRVKVELKNGATYEAKIKDVDEKADIALIKIDHQGKLPVLLLGRSSELRPGEFVVAIGSPFSLQNTVTTGIVSTTQRGGKELGLRNSDMDYIQTDAIINYGNSGGPLVNLDGEVIGINTLKVTAGISFAIPSDKIKKFLTESHDRQAKGKAITKKKYIGIRMMSLTSSKAKELKDRHRDFPDVISGAYIIEVIPDTPAEAGGLKENDVIISINGQSVVSANDVSDVIKRESTLNMVVRRGNEDIMITVIPEEIDP

1. A host cell comprising:
(a) a polynucleotide encoding a cell surface protein fused to a PDZ Domain; and
(b) a polynucleotide encoding an antibody, or antigen-binding fragment thereof, fused to a PDZ-binding peptide.

2. The host cell of claim 1, where the PDZ-binding peptide is 5 to 20 amino acids in length.

3. The host cell of claim 1, wherein the cell is selected from the group consisting of a eukaryotic cell and a prokaryotic cell.

4. The host cell of claim 3 wherein the eukaryotic cell is a yeast cell or a mammalian cell.

5. The host cell of claim 4 wherein the yeast cell is selected from the group consisting of S. cerevisiae, P. pastoris, C. albicans, H. polymorpha, Y. lipolitica, and S. pombe.

6. The host cell of claim 3 wherein the prokaryotic cell is selected from the group consisting of E. coli, Salmonella typhimurium, Bacillus subtilis, Pseudomonas aeruginosa, and Serratia marcescans.

7. The host cell of claim 1, wherein the cell surface protein is a cell wall protein.

8. The host cell of claim 7, wherein the cell wall protein is selected from the group consisting of Aga1, Aga2, Agα1, Cwp1, Cwp2, Gas1p, Yap3p, Flo1p, Crh2p, Pir1, Pir2, Pir3, and Pir4.

9. The host cell of claim 1, wherein each of the PDZ Domain and the PDZ-binding peptide comprise a Cys residue.

10. The host cell of claim 1, wherein the polynucleotide of part (a) further encodes an enhancer domain.

11. The host cell of claim 10, wherein the enhancer domain is a variant of the 10^{th} fibronectin type III domain of human fibronectin (FN3).

12. The host cell of claim 1, wherein the PDZ Domain is selected from the group consisting of an InaD PDZ domain (SEQ ID NO: 2), a Dishevelled 1-like (DVL1L) PDZ (SEQ ID NO: 3), a proTGF-alpha cytoplasmic domain-interacting proteins 18 (TACIP18) PDZ1 (SEQ ID NO: 4), a similar to TACIP18 (SITAC) PDZ1 (SEQ ID NO: 5), a PSD-95/SAP90 PDZ3 domain (SEQ ID NO: 6), and an Erbin PDZ domain (SEQ ID NO: 7).

13. The host cell of claim 1, wherein the PDZ-binding peptide comprises a C-terminal sequence of NorpA (SEQ ID NO: 1) or a fragment thereof at least 90% identical.

14. The host cell of claim 13, wherein a Cys residue is located at the −1 position.

15. The host cell of claim 1, wherein the PDZ-binding peptide sequence is GKTEFCA (SEQ ID NO: 16).

16. The host cell of claim 1, wherein the PDZ-binding peptide is fused to the C-terminus of the antibody or antigen-binding fragment thereof.

17. The host cell of claim 1, wherein the polynucleotide of part (a) and/or the polynucleotide of part (b) further encodes a fluorescent marker protein.

18. The host cell of claim 1, wherein the polynucleotide of part (a) is integrated into the host cell genome.

19. The host cell of claim 1, wherein the polynucleotides of part (a) and part (b) are in separate vectors, or optionally in the same vector.

20. The host cell of claim 1, wherein the antibody is a tetrameric IgG immunoglobulin comprising two heavy chains and two light chains.

21. The host cell of claim 1, wherein the antigen-binding fragment of the antibody comprises at least the heavy chain variable region and/or the light chain variable region.

22. The host cell of claim 21, wherein the antigen-binding fragment of the antibody comprises a Fab or a scFv.

23. (canceled)

24. The host cell of claim 1, wherein the polynucleotide of part (a) further comprises a signal sequence directing the cell surface protein to the cell surface.

25. The host cell of claim 24, wherein the signal sequence is an Aga2 signal sequence when the host cell is a yeast cell.

26. The host cell of claim 1, wherein the PDZ-binding peptide is less than 15 amino acids in length.

27. The host cell of claim 1, wherein the PDZ Domain is about 80 to 100 amino acids in length.

28. The host cell of claim 1, wherein the PDZ Domain-PDZ binding peptide interaction has a K_{d} of about 100 nM or less.

29. A plurality of cells comprising at least 10̂3 different eukaryotic host cells according to any of the above claims, each such eukaryotic host cell expressing on its surface a different antibody, or antigen-binding fragment thereof.

30. The plurality of cells of claim 29 wherein the eukaryotic host cells are yeast cells or mammalian cells.

31. (canceled)

32. A method of displaying at least 10̂3 different antibodies, or antigen-binding fragments thereof, on cell surfaces, comprising culturing the plurality of cells of claim 29.

33. The method of claim 32, wherein the PDZ Domain and the PDZ-binding peptide are connected by at least one disulfide bond.

34. The method of claim 32, further comprising contacting the plurality of cells with an antigen, and optionally selecting cells which bind to the antigen.

35-37. (canceled)

38. A method of selecting an antibody, or antigen-binding fragment thereof, comprising:
(a) contacting a plurality of phage displaying antibody or antigen-binding fragments with an antigen, and selecting phage which bind to the antigen, and
(b) contacting the plurality of yeast cells of claim 30 with said antigen, and selecting cells which bind to the antigen.

39. A method of selecting an antibody, or antigen-binding fragment thereof, comprising:
(a) contacting a plurality of phage displaying antibody or antigen-binding fragments with an antigen, and selecting phage which bind to the antigen, and
(b) contacting the plurality of mammalian cells of claim 30 with said antigen, and selecting cells which bind to the antigen.

40. A method of selecting an antibody, or antigen-binding fragment thereof, comprising:
(a) contacting the plurality of yeast cells of claim 30 with an antigen, and selecting cells which bind to the antigen, and
(b) contacting the plurality of mammalian cells of claim 30 with said antigen, and selecting cells which bind to the antigen.

41. The method of claim 40 further comprising the step of contacting a plurality of phage displaying antibody or antigen-binding fragments with an antigen, and selecting phage which bind to the antigen.
